(19) United States
(12) Patent Application Publication
(10) Pub. No.: US 2010/0024070 A1
(43) Pub. Date: Jan. 28, 2010

(54) MODULATION OF OIL LEVELS IN PLANTS

(76) Inventors: Steven Craig Bobzin, Malibu, CA (US); Daniel Mumenthaler, Bonita, CA (US); Joel Cruz Rarang, Granada Hills, CA (US)

Correspondence Address: FISH & RICHARDSON P.C., PO BOX 1022, MINNEAPOLIS, MN, 55440-1022, US

(21) Appl. No.: 12/300,833

(22) PCT Filed: May 15, 2007
(86) PCT No.: PCT/US2007/011742

§ 371 Date: Apr. 15, 2009

Related U.S. Application Data
(60) Provisional application No. 60/800,479, filed on May 15, 2006.

(51) Int. Cl. A01H 5/00; C12N 5/04

(52) U.S. Cl. 800/298; 435/419

(57) ABSTRACT

Methods and materials for modulating (e.g., increasing or decreasing) oil levels in plants are disclosed. For example, nucleic acids encoding oil-modulating polypeptides are disclosed as well as methods for using such nucleic acids to transform plant cells. Also disclosed are plants having increased oil levels and plant products produced from plants having increased oil levels.

### TECHNICAL FIELD

[0001] This document relates to methods and materials involved in modulating (e.g., increasing or decreasing) oil levels in plants. For example, this document provides plants having increased oil levels as well as materials and methods for making plants and plant products having increased oil levels.

### INCORPORATION-BY-REFERENCE & TEXTS

[0002] The material on the accompanying diskette is hereby incorporated by reference into this application. The accompanying compact discs contain one file, 11696-227WO1—Sequence.txt, which was created on May 14, 2007. The file named 11696-227WO1—Sequence.txt is 934 KB. The file can be accessed using Microsoft Word on a computer that uses Windows OS.

### BACKGROUND

[0003] Fat, protein, and carbohydrates are nutrients that supply calories to the body. Fat provides nine calories per gram, which is more than twice the number provided by carbohydrates or protein. Dietary fats are composed of fatty acids and glycerol. The glycerol can be converted to glucose by the liver and used as a source of energy. The fatty acids are a good source of energy for many tissues, especially heart and skeletal muscle.

[0004] Fatty acids consist of carbon chains of various lengths and a terminal carboxylic acid group. Saturated fatty acids do not contain any double bonds or other functional groups along the chain. A saturated fatty acid has the maximum possible number of hydrogen atoms attached to every carbon atom. Therefore, it is said to be saturated with hydrogen atoms. Eating too much saturated fat is one of the major risk factors for heart disease. Saturated fats are found in animal products such as butter, cheese, whole milk, ice cream, cream, and fatty meats. Saturated fats are also found in some vegetable oils, such as coconut, palm, and palm kernel oils. Most other vegetable oils contain unsaturated fat that helps to lower blood cholesterol if used in place of saturated fat.

[0005] Unsaturated fatty acids contain one or more double bonds between carbon atoms and, therefore, two fewer hydrogen atoms per double bond. A fatty acid with a single double bond is called a monounsaturated fatty acid. A fatty acid with two or more double bonds is called a polyunsaturated fatty acid. Polyunsaturated fats are liquid at room temperature, and remain in liquid form even when refrigerated or frozen. Polyunsaturated fats are divided into two families: the omega-3 fats and the omega-6 fats.

[0006] The omega-3 family of fatty acids includes alpha-linolenic acid (ALA). ALA is an essential fatty acid that cannot be synthesized in the body and must, therefore, be consumed in the diet. Dietary sources of ALA include canola, flaxseed, flaxseed oil, soybean, and pumpkin seed oil. Omega-3 fatty acids have been found to reduce the risks of heart problems, lower high blood pressure, and ameliorate autoimmune diseases.

[0007] Omega-6 fatty acids are beneficial as well. The omega-6 family of fatty acids includes linoleic acid, which is another essential fatty acid. The body converts linoleic acid to gamma linoleic acid (GLA) and ultimately to prostaglandins, which are hormone-like molecules that help regulate inflammation and blood pressure as well as heart, gastrointestinal, and kidney functions. The main sources of omega-6 fatty acids are vegetable oils such as corn oil and soy oil.

[0008] Vegetable oil is fat extracted from plant sources. Vegetable oils are used in cooking, in making margarine and other processed foods, and in producing several non-food items such as soap, cosmetics, medicine, and paint. Since vegetable oils are usually extracted from the seeds of the plant, seed oil yield has a significant impact on the economics of producing many products. Increasing seed oil content may increase the economic return per unit to the seller of the seed in addition to increasing the nutritional value to the consumer of the seed.

### SUMMARY

[0009] This document provides methods and materials related to plants having modulated (e.g., increased or decreased) levels of oil. For example, this document provides transgenic plants and plant cells having increased levels of oil, nucleic acids used to generate transgenic plants and plant cells having increased levels of oil, and methods for making plants and plant cells having increased levels of oil. Such plants and plant cells can be grown to produce, for example, seeds having increased oil content. Increasing the oil content of seeds can increase the nutritional value of the seeds and the yield of oil obtained from the seeds, which may benefit both food consumers and producers.

[0010] In one aspect, a method of modulating the level of oil in a plant in provided. The method comprises introducing into a plant cell an isolated nucleic acid comprising a nucleotide sequence encoding a polypeptide having 80 percent or greater sequence identity to an amino acid sequence selected from the group consisting of SEQ ID NO:80, SEQ ID NOs:82-85, SEQ ID NOs:87-127, SEQ ID NOs:129-130, SEQ ID NOs:132-133, SEQ ID NOs:135-138, SEQ ID NOs:140-146, SEQ ID NOs:148-149, SEQ ID NO:151, SEQ ID NO:153, SEQ ID NOs:155-160, SEQ ID NOs:162-164, SEQ ID NO:166, SEQ ID NOs:168-171, SEQ ID NO:173, SEQ ID NOs:175-177, SEQ ID NOs:179-183, SEQ ID NOs:185-188, SEQ ID NOs:190-193, SEQ ID NOs:195-196, SEQ ID NOs:198-199, SEQ ID NO:201, SEQ ID NOs:203-214, SEQ ID NO:216, SEQ ID NO:218, SEQ ID NOs:220-227, SEQ ID NOs:229-230, SEQ ID NOs:232-235, SEQ ID NOs:237-243, SEQ ID NO:245, and SEQ ID NOs:247-249, where a tissue of a plant produced from the plant cell has a difference in the level of oil as compared to the corresponding level in tissue of a control plant that does not comprise the nucleic acid.

[0011] In another aspect, a method of modulating the level of oil in a plant is provided. The method comprises introducing into a plant cell an isolated nucleic acid comprising a nucleotide sequence encoding a polypeptide having 80 percent or greater sequence identity to an amino acid sequence selected from the group consisting of SEQ ID NO:80, SEQ ID NO:82, SEQ ID NO:87, SEQ ID NOs:89-90, SEQ ID NO:129, SEQ ID NO:132, SEQ ID NO:135, SEQ ID NO:140, SEQ ID NO:143, SEQ ID NOs:148-149, SEQ ID NO:151, SEQ ID NO: 153, SEQ ID NOs:155-159, SEQ ID NOs:162-164, SEQ ID NO:166, SEQ ID NOs:168-171, SEQ ID NO:173, SEQ ID NOs:175-177, SEQ ID NOs:179-181, SEQ ID NO:183, SEQ ID NOs:185-186, SEQ ID NOs:190-192, SEQ ID NOs:195-196, SEQ ID NOs:198-199, SEQ ID NO:201, SEQ ID NOs:203-206, SEQ ID NOs:208-214, SEQ ID NO:216, SEQ ID NO:218, SEQ ID NO:220, SEQ ID NOs:222-226, SEQ ID NOs:229-230, SEQ ID NOs:232-233, SEQ ID NO:235, SEQ ID NO:237, SEQ ID NO:242, SEQ ID NO:245, SEQ ID NO:247, and SEQ ID NO:249, where a tissue of a plant produced from the plant cell has a difference in the level of oil as compared to the corresponding level in tissue of a control plant that does not comprise the nucleic acid.

[0012] In another aspect, a method of modulating the level of oil in a plant is provided. The method comprises introducing into a plant cell an isolated nucleic acid comprising a nucleotide sequence encoding a polypeptide having 80 percent or greater sequence identity to an amino acid sequence selected from the group consisting of SEQ ID NO:80, SEQ ID NO:82, SEQ ID NO:87, SEQ ID NOs:89-90, SEQ ID NO:129, SEQ ID NO:132, SEQ ID NO:135, SEQ ID NO:140, SEQ ID NO:143, SEQ ID NOs:148-149, SEQ ID NO:151, SEQ ID NO:153, SEQ ID NOs:155-159, SEQ ID NOs:162-164, SEQ ID NO:166, SEQ ID NOs:168-171, SEQ ID NO:173, SEQ ID NOs:175-177, SEQ ID NOs:179-181, SEQ ID NO:183, SEQ ID NOs:185-186, SEQ ID NOs:190-192, SEQ ID NOs:195-196, SEQ ID NOs:198-199, SEQ ID NO:201, SEQ ID NOs:203-206, SEQ ID NOs:208-214, SEQ ID NO:216, SEQ ID NO:218, SEQ ID NO:220, SEQ ID NOs:222-226, SEQ ID NOs:229-230, SEQ ID NOs:232-233, SEQ ID NO:235, SEQ ID NO:237, SEQ ID NO:242, SEQ ID NO:245, SEQ ID NO:247, and SEQ ID NO:249, where a tissue of a plant produced from the plant cell has a difference in the level of oil as compared to the corresponding level in tissue of a control plant that does not comprise the nucleic acid.

[0013] The sequence identity can be 85 percent or greater, 90 percent or greater, or 95 percent or greater. The nucleotide sequence can encode a polypeptide comprising an amino acid sequence corresponding SEQ ID NO:80. The nucleotide sequence can encode a polypeptide comprising an amino acid sequence corresponding to SEQ ID NO:82. The nucleotide sequence can encode a polypeptide comprising an amino acid sequence corresponding to SEQ ID NO:87. The nucleotide sequence can encode a polypeptide comprising an amino acid sequence corresponding to SEQ ID NO:148. The nucleotide sequence can encode a polypeptide comprising an amino acid sequence corresponding to SEQ ID NO:151. The nucleotide sequence can encode a polypeptide comprising an amino acid sequence corresponding to SEQ ID NO:162. The nucleotide sequence can encode a polypeptide comprising an amino acid sequence corresponding to SEQ ID NO:173. The nucleotide sequence can encode a polypeptide comprising an amino acid sequence corresponding to SEQ ID NO:175. The nucleotide sequence can encode a polypeptide comprising an amino acid sequence corresponding to SEQ ID NO:185. The nucleotide sequence can encode a polypeptide comprising an amino acid sequence corresponding to SEQ ID NO:190. The nucleotide sequence can encode a polypeptide comprising an amino acid sequence corresponding to SEQ ID NO:198. The nucleotide sequence can encode a polypeptide comprising an amino acid sequence corresponding to SEQ ID NO:201. The nucleotide sequence can encode a polypeptide comprising an amino acid sequence corresponding to SEQ ID NO:203. The nucleotide sequence can encode a polypeptide comprising an amino acid sequence corresponding to SEQ ID NO:216. The nucleotide sequence can encode a polypeptide comprising an amino acid sequence corresponding to SEQ ID NO:229. The nucleotide sequence can encode a polypeptide comprising an amino acid sequence corresponding to SEQ ID NO:245. The difference can be an increase in the level of oil. The isolated nucleic acid can be operably linked to a regulatory region. The regulatory region can be a promoter. The promoter can be a tissue-preferential, broadly expressing, or inducible promoter. The plant can be a dicot. The plant can be a member of the genus Anacardium, Arachis, Azadirachta, Brassica, Cannabis, Carthamus, Corylus, Crambe, Cucurbita, Glycine, Gossypium, Helianthus, Jatropha, Juglans, Linum, Olea, Papaver, Persea, Prunus, Ricinus, Sesamum, Simmondsia, or Vitis. The plant can be a monocot. The plant can be a member of the genus Cocos, Elaeis, Oryza, or Zea. The tissue can be seed tissue.

[0014] A method of producing a plant tissue is also provided. The method comprises growing a plant cell comprising an exogenous nucleic acid comprising a nucleotide sequence encoding a polypeptide having 80 percent or greater sequence identity to an amino acid sequence selected from the group consisting of SEQ ID NO:80, SEQ ID NOs:82-85, SEQ ID NOs:87-127, SEQ ID NOs:129-130, SEQ ID NOs:132-133, SEQ ID NOs:135-138, SEQ ID NOs:140-146, SEQ ID NOs:148-149, SEQ ID NO:151, SEQ ID NO:153, SEQ ID NOs:155-160, SEQ ID NOs:162-164, SEQ ID NO:166, SEQ ID NOs:168-171, SEQ ID NO:173, SEQ ID NOs:175-177, SEQ ID NOs:179-183, SEQ ID NOs:185-188, SEQ ID NOs:190-193, SEQ ID NOs:195-196, SEQ ID NOs:198-199, SEQ ID NO:201, SEQ ID NOs:203-214, SEQ ID NO:216, SEQ ID NO:218, SEQ ID NOs:220-227, SEQ ID NOs:229-230, SEQ ID NOs:232-235, SEQ ID NOs:237-243, SEQ ID NO:245, and SEQ ID NOs:247-249, where the tissue has a difference in the level of oil as compared to the corresponding level in tissue of a control plant that does not comprise the nucleic acid.

[0015] In another aspect, a method of producing a plant tissue is provided. The method comprises growing a plant cell comprising an exogenous nucleic acid comprising a nucleotide sequence encoding a polypeptide having 80 percent or greater sequence identity to an amino acid sequence selected from the group consisting of SEQ ID NO:80, SEQ ID NO:82, SEQ ID NO:87, SEQ ID NOs:89-90, SEQ ID NO:129, SEQ ID NO:132, SEQ ID NO:135, SEQ ID NO:140, SEQ ID NO:143, SEQ ID NOs:148-149, SEQ ID NO:151, SEQ ID NO:153, SEQ ID NOs:155-159, SEQ ID NOs:162-164, SEQ ID NO:166, SEQ ID NOs:168-171, SEQ ID NO:173, SEQ ID NOs:175-177, SEQ ID NOs:179-181, SEQ ID NO:183, SEQ ID NOs:185-186, SEQ ID NOs:190-192, SEQ ID NOs:195-196, SEQ ID NOs:198-199, SEQ ID NO:201, SEQ ID NOs:203-206, SEQ ID NOs:208-214, SEQ ID NO:216, SEQ ID NO:218, SEQ ID NO:220, SEQ ID NOs:222-226, SEQ ID NOs:229-230, SEQ ID NOs:232-233, SEQ ID NO:235, SEQ ID NO:237, SEQ ID NO:242, SEQ ID NO:245, SEQ ID NO:247, and SEQ ID NO:249, where the tissue has a difference in the level of oil as compared to the corresponding level in tissue of a control plant that does not comprise the nucleic acid.

[0016] In another aspect, a method of producing a plant tissue is provided. The method comprises growing a plant cell comprising an exogenous nucleic acid comprising a nucleotide sequence encoding a polypeptide having 80 percent or greater sequence identity to an amino acid sequence selected from the group consisting of SEQ ID NO:80, SEQ ID NO:82, SEQ ID NO:87, SEQ ID NOs:89-90, SEQ ID NO:129, SEQ ID NO:132, SEQ ID NO:135, SEQ ID NO:140, SEQ ID NO:143, SEQ ID NOs:148-149, SEQ ID NO:151, SEQ ID NO:153, SEQ ID NOs:155-159, SEQ ID NOs:162-164, SEQ ID NO:166, SEQ ID NOs:168-171, SEQ ID NO:173, SEQ ID NOs:175-177, SEQ ID NOs:179-181, SEQ ID NO:183, SEQ ID NOs:185-186, SEQ ID NOs:190-192, SEQ ID NOs:195-196, SEQ ID NOs:198-199, SEQ ID NO:201, SEQ ID NOs:203-206, SEQ ID NOs:208-214, SEQ ID NO:216, SEQ ID NO:218, SEQ ID NO:220, SEQ ID NOs:222-226, SEQ ID NOs:229-230, SEQ ID NOs:232-233, SEQ ID NO:235, SEQ ID NO:237, SEQ ID NO:242, SEQ ID NO:245, SEQ ID NO:247, and SEQ ID NO:249, where the tissue has a difference in the level of oil as compared to the corresponding level in tissue of a control plant that does not comprise the nucleic acid.

[0017] The sequence identity can be 85 percent or greater, 90 percent or greater, or 95 percent or greater. The nucleotide sequence can encode a polypeptide comprising an amino acid sequence corresponding to SEQ ID NO:80. The nucleotide sequence can encode a polypeptide comprising an amino acid sequence corresponding to SEQ ID NO:82. The nucleotide sequence can encode a polypeptide comprising an amino acid sequence corresponding to SEQ ID NO:87. The nucleotide sequence can encode a polypeptide comprising an amino acid sequence corresponding to SEQ ID NO:148. The nucleotide sequence can encode a polypeptide comprising an amino acid sequence corresponding to SEQ ID NO:151. The nucleotide sequence can encode a polypeptide comprising an amino acid sequence corresponding to SEQ ID NO:162. The nucleotide sequence can encode a polypeptide comprising an amino acid sequence corresponding to SEQ ID NO:173. The nucleotide sequence can encode a polypeptide comprising an amino acid sequence corresponding to SEQ ID NO:175. The nucleotide sequence can encode a polypeptide comprising an amino acid sequence corresponding to SEQ ID NO:185. The nucleotide sequence can encode a polypeptide comprising an amino acid sequence corresponding to SEQ ID NO:190. The nucleotide sequence can encode a polypeptide comprising an amino acid sequence corresponding to SEQ ID NO:198. The nucleotide sequence can encode a polypeptide comprising an amino acid sequence corresponding to SEQ ID NO:201. The nucleotide sequence can encode a polypeptide comprising an amino acid sequence corresponding to SEQ ID NO:203. The nucleotide sequence can encode a polypeptide comprising an amino acid sequence corresponding to SEQ ID NO:216. The nucleotide sequence can encode a polypeptide comprising an amino acid sequence corresponding to SEQ ID NO:229. The nucleotide sequence can encode a polypeptide comprising an amino acid sequence corresponding to SEQ ID NO:245. The difference can be an increase in the level of oil. The exogenous nucleic acid can be operably linked to a regulatory region. The regulatory region can be a promoter. The promoter can be a tissue-preferential, broadly expressing, or inducible promoter. The plant tissue can be dicotyledonous. The plant tissue can be a member of the genus Anacardium, Arachis, Azadirachta, Brassica, Cannabis, Carthamus, Corylus, Crambe, Cucurbita, Glycine, Gossypium, Helianthus, Jatropha, Juglans, Linum, Olea, Papaver, Persea, Prunus, Ricinus, Sesamum, Simmondsia, or Vitis. The plant tissue can be monocotyledonous. The plant tissue can be a member of the genus Cocos, Elaeis, Oryza, or Zea. The tissue can be seed tissue.

[0018] A plant cell is also provided. The plant cell comprises an exogenous nucleic acid comprising a nucleotide sequence encoding a polypeptide having 80 percent or greater sequence identity to an amino acid sequence selected from the group consisting of SEQ ID NO:80, SEQ ID NOs:82-85, SEQ ID NOs:87-127, SEQ ID NOs:129-130, SEQ ID NOs:132-133, SEQ ED NOs:135-138, SEQ ID NOs:140-146, SEQ ID NOs:148-149, SEQ ID NO:151, SEQ ID NO:153, SEQ ID NOs:155-160, SEQ ID NOs:162-164, SEQ ID NO:166, SEQ ID NOs:168-171, SEQ ID NO:173, SEQ ID NOs:175-177, SEQ ID NOs:179-183, SEQ ID NOs:185-188, SEQ ID NOs:190-193, SEQ ID NOs:195-196, SEQ ID NOs:198-199, SEQ ID NO:201, SEQ ID NOs:203-214, SEQ ID NO:216, SEQ ID NO:218, SEQ ID NOs:220-227, SEQ ID NOs:229-230, SEQ ID NOs:232-235, SEQ ID NOs:237-243, SEQ ID NO:245, and SEQ ID NOs:247-249, where a tissue of a plant produced from the plant cell has a difference in the level of oil as compared to the corresponding level in tissue of a control plant that does not comprise the nucleic acid.

[0019] In another aspect, a plant cell is provided. The plant cell comprises an exogenous nucleic acid comprising a nucleotide sequence encoding a polypeptide having 80 percent or greater sequence identity to an amino acid sequence selected from the group consisting of SEQ ID NO:80, SEQ ID NO:82, SEQ ID NO:87, SEQ ID NOs:89-90, SEQ ID NO:129, SEQ ID NO:132, SEQ ID NO:135, SEQ ID NO:140, SEQ ID NO:143, SEQ ID NOs:148-149, SEQ ID NO:151, SEQ ID NO:153, SEQ ID NOs:155-159, SEQ ID NOs:162-164, SEQ ID NO:166, SEQ ID NOs:168-171, SEQ ID NO:173, SEQ ID NOs:175-177, SEQ ID NOs:179-181, SEQ ID NO:183, SEQ ID NOs:185-186, SEQ ID NOs:190-192, SEQ ID NOs:195-196, SEQ ID NOs:198-199, SEQ ID NO:201, SEQ ID NOs:203-206, SEQ ID NOs:208-214, SEQ ID NO:216, SEQ ID NO:218, SEQ ID NO:220, SEQ ID NOs:222-226, SEQ ID NOs:229-230, SEQ ID NOs:232-233, SEQ ID NO:235, SEQ ID NO:237, SEQ ID NO:242, SEQ ID NO:245, SEQ ID NO:247, and SEQ ID NO:249, where a tissue of a plant produced from the plant cell has a difference in the level of oil as compared to the corresponding level in tissue of a control plant that does not comprise the nucleic acid.

[0020] In another aspect, a plant cell is provided. The plant cell comprises an exogenous nucleic acid comprising a nucleotide sequence encoding a polypeptide having 80 percent or greater sequence identity to an amino acid sequence selected from the group consisting of SEQ ID NO:80, SEQ ID NO:82, SEQ ID NO:87, SEQ ID NOs:89-90, SEQ ID NO:129, SEQ ID NO:132, SEQ ID NO:135, SEQ ID NO:140, SEQ ID NO:143, SEQ ID NOs:148-149, SEQ ID NO:151, SEQ ID NO:153, SEQ ID NOs:155-159, SEQ ID NOs:162-164, SEQ ID NO:166, SEQ ID NOs:168-171, SEQ ID NO:173, SEQ ID NOs:175-177, SEQ ID NOs:179-181, SEQ ID NO:183, SEQ ID NOs:185-186, SEQ ID NOs:190-192, SEQ ID NOs:195-196, SEQ ID NOs:198-199, SEQ ID NO:201, SEQ ID NOs:203-206, SEQ ID NOs:208-214, SEQ ID NO:216, SEQ ID NO:218, SEQ ID NO:220, SEQ ID NOs:222-226, SEQ ID NOs:229-230, SEQ ID NOs:232-233, SEQ ID NO:235, SEQ ID NO:237, SEQ ID NO:242, SEQ ID NO:245, SEQ ID NO:247, and SEQ ID NO:249, where a tissue of a plant produced from the plant cell has a difference in the level of oil as compared to the corresponding level in tissue of a control plant that does not comprise the nucleic acid.

[0021] The sequence identity can 85 percent or greater, 90 percent or greater, or 95 percent or greater. The nucleotide sequence can encode a polypeptide comprising an amino acid sequence corresponding to SEQ ID NO:80. The nucleotide sequence can encode a polypeptide comprising an amino acid sequence corresponding to SEQ ID NO:82. The nucleotide sequence can encode a polypeptide comprising an amino acid sequence corresponding to SEQ ID NO:87. The nucleotide sequence can encode a polypeptide comprising an amino acid sequence corresponding to SEQ ID NO:148. The nucleotide sequence can encode a polypeptide comprising an amino acid sequence corresponding to SEQ ID NO:151. The nucleotide sequence can encode a polypeptide comprising an amino acid sequence corresponding to SEQ ID NO:162. The nucleotide sequence can encode a polypeptide comprising an amino acid sequence corresponding to SEQ ID NO:173. The nucleotide sequence can encode a polypeptide comprising an amino acid sequence corresponding to SEQ ID NO:175. The nucleotide sequence can encode a polypeptide comprising an amino acid sequence corresponding to SEQ ID NO:185. The nucleotide sequence can encode a polypeptide comprising an amino acid sequence corresponding to SEQ ID NO:190. The nucleotide sequence can encode a polypeptide comprising an amino acid sequence corresponding to SEQ ID NO:198. The nucleotide sequence can encode a polypeptide comprising an amino acid sequence corresponding to SEQ ID NO:201. The nucleotide sequence can encode a polypeptide comprising an amino acid sequence corresponding to SEQ ID NO:203. The nucleotide sequence can encode a polypeptide comprising an amino acid sequence corresponding to SEQ ID NO:216. The nucleotide sequence can encode a polypeptide comprising an amino acid sequence corresponding to SEQ ID NO:229. The nucleotide sequence can encode a polypeptide comprising an amino acid sequence corresponding to SEQ ID NO:245. The difference can be an increase in the level of oil. The exogenous nucleic acid can be operably linked to a regulatory region. The regulatory region can be a promoter. The promoter can be a tissue-preferential, broadly expressing, or inducible promoter. The plant can be a dicot. The plant can be a member of the genus Anacardium, Arachis, Azadirachta, Brassica, Cannabis, Carthamus, Corylus, Crambe, Cucurbita, Glycine, Gossypium, Helianthus, Jatropha, Juglans, Linum, Olea, Papaver, Persea, Prunus, Ricinus, Sesamum, Simmondsia, or Vitis. The plant can be a monocot. The plant can be a member of the genus Cocos, Elaeis, Oryza, or Zea. The tissue can be seed tissue.

[0022] A transgenic plant is also provided. The transgenic plant comprises any of the plant cells described above. Progeny of the transgenic plant are also provided. The progeny has a difference in the level of oil as compared to the level of oil in a corresponding control plant that does not comprise the exogenous nucleic acid. Seed, vegetative tissue, and fruit from the transgenic plant are also provided. In addition, food products and feed products comprising seed, vegetative tissue, or fruit from the transgenic plant are provided. Oil from the seed of the transgenic plant is provided, as is a method of making oil. The method comprises extracting oil from the seed of the transgenic plant.

[0023] In another aspect, a method of modulating the level of oil in a plant is provided. The method comprises introducing into a plant cell an exogenous nucleic acid comprising a nucleotide sequence encoding a polypeptide, where the HMM bit score of the amino acid sequence of the polypeptide is greater than 50, the HMM based on the amino acid sequences depicted in one of FIGS. 1-14, and where a tissue of a plant produced from the plant cell has a difference in the level of oil as compared to the corresponding level in tissue of a control plant that does not comprise the exogenous nucleic acid.

[0024] In another aspect, a method of modulating the level of oil in a plant is provided. The method comprises introducing into a plant cell an exogenous nucleic acid comprising a nucleotide sequence encoding a polypeptide 50-85 amino acids in length, where the polypeptide is the amino terminus of a polypeptide having at least 450 amino acids and having an HMM bit score greater than 622, the HMM based on the amino acid sequences depicted in FIG. 15, and where a tissue of a plant produced from the plant cell has a difference in the level of oil as compared to the corresponding level in tissue of a control plant that does not comprise the exogenous nucleic acid.

[0025] In another aspect, a method of modulating the level of oil in a plant is provided. The method comprises introducing into a plant cell an exogenous nucleic acid comprising a nucleotide sequence encoding a polypeptide having 80 percent or greater sequence identity to an amino acid sequence selected from the group consisting of SEQ ID NO:80, SEQ ID NOs:82-85, SEQ ID NOs:87-127, SEQ ID NOs:129-130, SEQ ID NOs:132-133, SEQ ID NOs:135-138, SEQ ID NOs:140-146, SEQ ID NOs:148-149, SEQ ID NO:151, SEQ ID NO:153, SEQ ID NOs:155-160, SEQ ID NOs:162-164, SEQ ID NO:166, SEQ ID NOs:168-171, SEQ ID NO:173, SEQ ID NOs:175-177, SEQ ID NOs:179-183, SEQ ID NOs:185-188, SEQ ID NOs:190-193, SEQ ID NOs:195-196, SEQ ID NOs:198-199, SEQ ID NO:201, SEQ ID NOs:203-214, SEQ ID NO:216, SEQ ID NO:218, SEQ ID NOs:220-227, SEQ ID NOs:229-230, SEQ ID NOs:232-235, SEQ ID NOs:237-243, SEQ ID NO:245, SEQ ID NOs:247-249, SEQ ID NO:309, SEQ ID NO:311, SEQ ID NO:313, SEQ ID NO:315, SEQ ID NOs:317-318, SEQ ID NOs:320-321, SEQ ID NO:323, SEQ ID NO:325, SEQ ID NO:327, SEQ ID NO:329, SEQ ID NOs:331-332, SEQ ID NOs:334-335, SEQ ID NOs:337-338, SEQ ID NOs:340-341, SEQ ID NOs:343-344, SEQ ID NO:346, SEQ ID NO:348, SEQ ID NO:350, SEQ ID NOs:352-353, SEQ ID NO:355, SEQ ID NO:357, SEQ ID NOs:359-360, SEQ ID NO:367, and SEQ ID NOs:415-441, where a tissue of a plant produced from the plant cell has a difference in the level of oil as compared to the corresponding level in tissue of a control plant that does not comprise the exogenous nucleic acid. The nucleotide sequence can encode a polypeptide comprising an amino acid sequence corresponding to SEQ ID NO:148.

[0026] In another aspect, a method of modulating the level of oil in a plant is provided. The method comprises introducing into a plant cell an exogenous nucleic acid comprising a nucleotide sequence having 80 percent or greater sequence identity to a nucleotide sequence selected from the group consisting of SEQ ID NO:79, SEQ ID NO:81, SEQ ID NO:86, SEQ ID NO:128, SEQ ID NO:131, SEQ ID NO:134, SEQ ID NO:139, SEQ ID NO:147, SEQ ID NO:150, SEQ ID NO:152, SEQ ID NO:154, SEQ ID NO:161, SEQ ID NO:165, SEQ ID NO:167, SEQ ID NO:172, SEQ ID NO:174, SEQ ID NO:178, SEQ ID NO:184, SEQ ID NO:189, SEQ ID NO:194, SEQ ID NO:197, SEQ ID NO:200, SEQ ID NO:202, SEQ ID NO:215, SEQ ID NO:217, SEQ ID NO:219, SEQ ID NO:228, SEQ ID NO:231, SEQ ID NO:236, SEQ ID NO:244, SEQ ID NO:246, SEQ ID NOs:265-308, SEQ ID NO:310, SEQ ID NO:312, SEQ ID NO:314, SEQ ID NO:316, SEQ ID NO:319, SEQ ID NO:322, SEQ ID NO:324, SEQ ID NO:326, SEQ ID NO:328, SEQ ID NO:330, SEQ ID NO:333, SEQ ID NO:336, SEQ ID NO:339, SEQ ID NO:342, SEQ ID NO:345, SEQ ID NO:347, SEQ ID NO:349, SEQ ID NO:351, SEQ ID NO:354, SEQ ID NO:356, SEQ ID NO:358, and SEQ ID NOs:361-366, where a tissue of a plant produced from the plant cell has a difference in the level of oil as compared to the corresponding level in tissue of a control plant that does not comprise the exogenous nucleic acid. The nucleotide sequence can comprise the nucleotide sequence set forth in SEQ ID NO:147.

[0027] The difference can be an increase in the level of oil. The exogenous nucleic acid can be operably linked to a regulatory region.

[0028] In another aspect, a method of modulating the level of oil in a plant is provided. The method comprises introducing into a plant cell an exogenous nucleic acid comprising a regulatory region operably linked to a polynucleotide whose transcription product is at least 30 nucleotides in length and is complementary to a nucleic acid encoding a polypeptide, where the HMM bit score of the amino acid sequence of the polypeptide is greater than 50, the HMM based on the amino acid sequences depicted in one of FIGS. 1-14, where the regulatory region modulates transcription of the polynucleotide in the plant cell, and where a tissue of a plant produced from the plant cell has a difference in the level of oil as compared to the corresponding level in tissue of a control plant that does not comprise the exogenous nucleic acid. The HMM bit score can be 100 or greater.

[0029] In another aspect, a method of modulating the level of oil in a plant is provided. The method comprises introducing into a plant cell an exogenous nucleic acid comprising a regulatory region operably linked to a polynucleotide that is transcribed into an interfering RNA effective for inhibiting expression of a polypeptide having 80 percent or greater sequence identity to an amino acid sequence selected from the group consisting of SEQ ID NO:80, SEQ ID NOs:82-85, SEQ ID NOs:87-127, SEQ ID NOs:129-130, SEQ ID NOs:132-133, SEQ BD NOs:135-138, SEQ ID NOs:140-146, SEQ ID NOs:148-149, SEQ ID NO:151, SEQ ID NO:153, SEQ ID NOs:155-160, SEQ ID NOs:162-164, SEQ ID NO:166, SEQ ID NOs:168-171, SEQ ID NO:173, SEQ ID NOs:175-177, SEQ ID NOs:179-183, SEQ ID NOs:185-188, SEQ ID NOs:190-193, SEQ ID NOs:195-196, SEQ ID NOs:198-199, SEQ ID NO:201, SEQ ID NOs:203-214, SEQ ID NO:216, SEQ ID NO:218, SEQ ID NOs:220-227, SEQ ID NOs:229-230, SEQ ID NOs:232-235, SEQ ID NOs:237-243, SEQ ID NO:245, SEQ ID NOs:247-249, SEQ ID NO:309, SEQ ID NO:311, SEQ ID NO:313, SEQ ID NO:315, SEQ ID NOs:317-318, SEQ ID NOs:320-321, SEQ ID NO:323, SEQ ID NO:325, SEQ ID NO:327, SEQ ID NO:329, SEQ ID NOs:331-332, SEQ ID NOs:334-335, SEQ ID NOs:337-338, SEQ ID NOs:340-341, SEQ ID NOs:343-344, SEQ ID NO:346, SEQ ID NO:348, SEQ ID NO:350, SEQ ID NOs:352-353, SEQ ID NO:355, SEQ ID NO:357, SEQ ID NOs:359-360, SEQ ID NO:367, and SEQ ID NOs:415-441, where the regulatory region modulates transcription of the polynucleotide in the plant cell, and where a tissue of a plant produced from the plant cell has a difference in the level of oil as compared to the corresponding level in tissue of a control plant that does not comprise the exogenous nucleic acid. The exogenous nucleic acid can further comprise a 3′ UTR operably linked to the polynucleotide. The polynucleotide can be transcribed into an interfering RNA comprising a stem-loop structure. The stem-loop structure can comprise an inverted repeat of the 3′ UTR.

[0030] The difference can be a decrease in the level of oil. The sequence identity can be 85 percent or greater, 90 percent or greater, or 95 percent or greater. The method can further comprise the step of producing a plant from the plant cell. The introducing step can comprise introducing the nucleic acid into a plurality of plant cells. The method can further comprise the step of producing a plurality of plants from the plant cells. The method can further comprise the step of selecting one or more plants from the plurality of plants that have the difference in the level of oil. The regulatory region can be a tissue-preferential, broadly expressing, or inducible promoter.

[0031] In another aspect, a method of producing a plant tissue is provided. The method can comprise growing a plant cell comprising an exogenous nucleic acid comprising a nucleotide sequence encoding a polypeptide, where the HMM bit score of the amino acid sequence of the polypeptide is greater than 50, the HMM based on the amino acid sequences depicted in one of FIGS. 1-14, and where the tissue has a difference in the level of oil as compared to the corresponding level in tissue of a control plant that does not comprise the exogenous nucleic acid.

[0032] In another aspect, a method of producing a plant tissue is provided. The method comprises growing a plant cell comprising an exogenous nucleic acid comprising a nucleotide sequence encoding a polypeptide 50-85 amino acids in length, where the polypeptide is the amino terminus of a polypeptide having at least 450 amino acids and having an HMM bit score greater than 622, the HMM based on the amino acid sequences depicted in FIG. 15, and where the tissue has a difference in the level of oil as compared to the corresponding level in tissue of a control plant that does not comprise the nucleic acid.

[0033] In another aspect, a method of producing a plant tissue is provided. The method comprises growing a plant cell comprising an exogenous nucleic acid comprising a nucleotide sequence encoding a polypeptide having 80 percent or greater sequence identity to an amino acid sequence selected from the group consisting of SEQ ID NO:80, SEQ ID NOs:82-85, SEQ ID NOs:87-127, SEQ ID NOs:129-130, SEQ ID NOs:132-133, SEQ ID NOs:135-138, SEQ ID NOs:140-146, SEQ ID NOs:148-149, SEQ ID NO:151, SEQ ID NO:153, SEQ ID NOs:155-160, SEQ ID NOs:162-164, SEQ ID NO:166, SEQ ID NOs:168-171, SEQ ID NO:173, SEQ ID NOs:175-177, SEQ ID NOs:179-183, SEQ ID NOs:185-188, SEQ ID NOs:190-193, SEQ ID NOs:195-196, SEQ ID NOs:198-199, SEQ ID NO:201, SEQ ID NOs:203-214, SEQ ID NO:216, SEQ ID NO:218, SEQ ID NOs:220-227, SEQ ID NOs:229-230, SEQ ID NOs:232-235, SEQ ID NOs:237-243, SEQ ID NO:245, SEQ ID NOs:247-249, SEQ ID NO:309, SEQ ID NO:311, SEQ ID NO:313, SEQ ID NO:315, SEQ ID NOs:317-318, SEQ ID NOs:320-321, SEQ ID NO:323, SEQ ID NO:325, SEQ ID NO:327, SEQ ID NO:329, SEQ ID NOs:331-332, SEQ ID NOs:334-335, SEQ ID NOs:337-338, SEQ ID NOs:340-341, SEQ ID NOs:343-344, SEQ ID NO:346, SEQ ID NO:348, SEQ ID NO:350, SEQ ID NOs:352-353, SEQ ID NO:355, SEQ ID NO:357, SEQ ID NOs:359-360, SEQ ID NO:367, and SEQ ID NOs:415-441, where the tissue has a difference in the level of oil as compared to the corresponding level in tissue of a control plant that does not comprise the nucleic acid.

[0034] In another aspect, a method of producing a plant tissue is provided. The method comprises growing a plant cell comprising an exogenous nucleic acid comprising a nucleotide sequence having 80 percent or greater sequence identity to a nucleotide sequence selected from the group consisting of SEQ ID NO:79, SEQ ID NO:81, SEQ ID NO:86, SEQ ID NO:128, SEQ ID NO:131, SEQ ID NO:134, SEQ ID NO:139, SEQ ID NO:147, SEQ ID NO:150, SEQ ID NO:152, SEQ ID NO:154, SEQ ID NO:161, SEQ ID NO:165, SEQ ID NO:167, SEQ ID NO:172, SEQ ID NO:174, SEQ ID NO:178, SEQ ID NO:184, SEQ ID NO:189, SEQ ID NO:194, SEQ ID NO:197, SEQ ID NO:200, SEQ ID NO:202, SEQ ID NO:215, SEQ ID NO:217, SEQ ID NO:219, SEQ ID NO:228, SEQ ID NO:231, SEQ ID NO-236, SEQ ID NO:244, SEQ ID NO:246, SEQ ID NOs:265-308, SEQ ID NO:310, SEQ ID NO:312, SEQ ID NO:314, SEQ ID NO:316, SEQ ID NO:319, SEQ ID NO:322, SEQ ID NO:324, SEQ ID NO:326, SEQ ID NO:328, SEQ ID NO:330, SEQ ID NO:333, SEQ ID NO:336, SEQ ID NO:339, SEQ ID NO:342, SEQ ID NO:345, SEQ ID NO:347, SEQ ID NO:349, SEQ ID NO:351, SEQ ID NO:354, SEQ ID NO:356, SEQ ID NO:358, and SEQ ID NOs:361-366, where the tissue has a difference in the level of oil as compared to the corresponding level in tissue of a control plant that does not comprise the nucleic acid.

[0035] In another aspect, a method of producing a plant tissue is provided. The method comprises growing a plant cell comprising an exogenous nucleic acid comprising a regulatory region operably linked to a polynucleotide whose transcription product is at least 30 nucleotides in length and is complementary to a nucleic acid encoding a polypeptide, where the HMM bit score of the amino acid sequence of the polypeptide is greater than 50, the HMM based on the amino acid sequences depicted in one of FIGS. 1-14, where the regulatory region modulates transcription of the polynucleotide in the plant cell, and where the tissue has a difference in the level of oil as compared to the corresponding level in tissue of a control plant that does not comprise the nucleic acid.

[0036] In another aspect, a method of producing a plant tissue is provided. The method comprises growing a plant cell comprising an exogenous nucleic acid comprising a regulatory region operably linked to a polynucleotide that is transcribed into an interfering RNA effective for inhibiting expression of a polypeptide having 80 percent or greater sequence identity to an amino acid sequence selected from the group consisting of SEQ ID NO:80, SEQ ID NOs:82-85, SEQ ID NOs:87-127, SEQ ID NOs:129-130, SEQ ID NOs:132-133, SEQ ID NOs:135-138, SEQ ID NOs:140-146, SEQ ID NOs:148-149, SEQ ID NO:151, SEQ ID NO:153, SEQ ID NOs:155-160, SEQ ID NOs:162-164, SEQ ID NO:166, SEQ ID NOs:168-171, SEQ ID NO:173, SEQ ID NOs:175-177, SEQ ID NOs:179-183, SEQ ID NOs:185-188, SEQ ID NOs:190-193, SEQ ID NOs:195-196, SEQ ID NOs:198-199, SEQ ID NO:201, SEQ ID NOs:203-214, SEQ ID NO:216, SEQ ID NO:218, SEQ ID NOs:220-227, SEQ ID NOs:229-230, SEQ ID NOs:232-235, SEQ ID NOs:237-243, SEQ ID NO:245, SEQ ID NOs:247-249, SEQ ID NO:309, SEQ ID NO:311, SEQ ID NO:313, SEQ ID NO:315, SEQ ID NOs:317-318, SEQ ID NOs:320-321, SEQ ID NO:323, SEQ ID NO:325, SEQ ID NO:327, SEQ ID NO:329, SEQ ID NOs:331-332, SEQ ID NOs:334-335, SEQ ID NOs:337-338, SEQ ID NOs:340-341, SEQ ID NOs:343-344, SEQ ID NO:346, SEQ ID NO:348, SEQ ID NO:350, SEQ ID NOs:352-353, SEQ ID NO:355, SEQ ID NO:357, SEQ ID NOs:359-360, SEQ ID NO:367, and SEQ ID NOs:415-441, where the regulatory region modulates transcription of the polynucleotide in the plant cell, and where the tissue has a difference in the level of oil as compared to the corresponding level in tissue of a control plant that does not comprise the nucleic acid.

[0037] The plant can be a dicot. The plant can be a member of the genus Anacardium, Arachis, Azadirachta, Brassica, Cannabis, Carthamus, Corylus, Crambe, Cucurbita, Glycine, Gossypium, Helianthus, Jatropha, Juglans, Linum, Olea, Papaver, Persea, Prunus, Ricinus, Sesamum, Simmondsia, or Vitis. The plant can be a monocot. The plant can be a member of the genus Cocos, Elaeis, Oryza, or Zea. The plant can be a species selected from the group consisting of Miscanthus hybrid (Miscanthus×giganteus), Miscanthus sinensis, Miscanthus sacchariflorus, Panicum virgatum, Populus balsamifera, Sorghum bicolor, and Saccharum spp. The tissue can be seed tissue.

[0038] In another aspect, a plant cell comprising an exogenous nucleic acid is provided. The exogenous nucleic acid comprises a nucleotide sequence encoding a polypeptide, where the HMM bit score of the amino acid sequence of the polypeptide is greater than 50, the HMM based on the amino acid sequences depicted in one of FIGS. 1-14, and where a tissue of a plant produced from the plant cell has a difference in the level of oil as compared to the corresponding level in tissue of a control plant that does not comprise the nucleic acid.

[0039] In another aspect, a plant cell comprising an exogenous nucleic acid is provided. The exogenous nucleic acid comprises a nucleotide sequence encoding a polypeptide 50-85 amino acids in length, where the polypeptide is the amino terminus of a polypeptide having at least 450 amino acids and having an HMM bit score greater than 622, the HMM based on the amino acid sequences depicted in FIG. 15, and where a tissue of a plant produced from the plant cell has a difference in the level of oil as compared to the corresponding level in tissue of a control plant that does not comprise the nucleic acid.

[0040] In another aspect, a plant cell comprising an exogenous nucleic acid is provided. The exogenous nucleic acid comprises a nucleotide sequence encoding a polypeptide having 80 percent or greater sequence identity to an amino acid sequence selected from the group consisting of SEQ ID NO:80, SEQ ID NOs:82-85, SEQ ID NOs:87-127, SEQ ID NOs:129-130, SEQ ID NOs:132-133, SEQ ID NOs:135-138, SEQ ID NOs:140-146, SEQ ID NOs:148-149, SEQ ID NO:151, SEQ ID NO:153, SEQ ID NOs:155-160, SEQ ID NOs:162-164, SEQ ID NO:166, SEQ ID NOs:168-171, SEQ ID NO:173, SEQ ID NOs:175-177, SEQ ID NOs:179-183, SEQ ID NOs:185-188, SEQ ID NOs:190-193, SEQ ID NOs:195-196, SEQ ID NOs:198-199, SEQ ID NO:201, SEQ ID NOs:203-214, SEQ ID NO:216, SEQ ID NO:218, SEQ ID NOs:220-227, SEQ ID NOs:229-230, SEQ ID NOs:232-235, SEQ ID NOs:237-243, SEQ ID NO:245, SEQ ID NOs:247-249, SEQ ID NO:309, SEQ ID NO:311, SEQ ID NO:313, SEQ ID NO:315, SEQ ID NOs:317-318, SEQ ID NOs:320-321, SEQ ID NO:323, SEQ ID NO:325, SEQ ID NO:327, SEQ ID NO:329, SEQ ID NOs:331-332, SEQ ID NOs:334-335, SEQ ID NOs:337-338, SEQ ID NOs:340-341, SEQ ID NOs:343-344, SEQ ID NO:346, SEQ ID NO:348, SEQ ID NO:350, SEQ ID NOs:352-353, SEQ ID NO:355, SEQ ID NO:357, SEQ ID NOs:359-360, SEQ ID NO:367, and SEQ ID NOs:415-441, where a tissue of a plant produced from the plant cell has a difference in the level of oil as compared to the corresponding level in tissue of a control plant that does not comprise the nucleic acid.

[0041] In another aspect, a plant cell comprising an exogenous nucleic acid is provided. The exogenous nucleic acid comprises a nucleotide sequence having 80 percent or greater sequence identity to a nucleotide sequence selected from the group consisting of SEQ ID NO:79, SEQ ID NO:81, SEQ ID NO:86, SEQ ID NO:128, SEQ ID NO:131, SEQ ID NO:134, SEQ ID NO:139, SEQ ID NO:147, SEQ ID NO:150, SEQ ID NO:152, SEQ ID NO:154, SEQ ID NO:161, SEQ ID NO:165, SEQ ID NO:167, SEQ ID NO:172, SEQ ID NO:174, SEQ ID NO:178, SEQ ID NO:184, SEQ ID NO:189, SEQ ID NO:194, SEQ ID NO:197, SEQ ID NO:200, SEQ ID NO:202, SEQ ID NO:215, SEQ ID NO:217, SEQ ID NO:219, SEQ ID NO:228, SEQ ID NO:231, SEQ ID NO:236, SEQ ID NO:244, SEQ ID NO:246, SEQ ID NOs:265-308, SEQ ID NO:310, SEQ ID NO:312, SEQ ID NO:314, SEQ ID NO:316, SEQ ID NO:319, SEQ ID NO:322, SEQ ID NO:324, SEQ ID NO:326, SEQ ID NO:328, SEQ ID NO:330, SEQ ID NO:333, SEQ ID NO:336, SEQ ID NO:339, SEQ ID NO:342, SEQ ID NO:345, SEQ ID NO:347, SEQ ID NO:349, SEQ ID NO:351, SEQ ID NO:354, SEQ ID NO:356, SEQ ID NO:358, and SEQ ID NOs:361-366, where a tissue of a plant produced from the plant cell has a difference in the level of oil as compared to the corresponding level in tissue of a control plant that does not comprise the nucleic acid.

[0042] In another aspect, a plant cell comprising an exogenous nucleic acid is provided. The exogenous nucleic acid comprises a regulatory region operably linked to a polynucleotide whose transcription product is at least 30 nucleotides in length and is complementary to a nucleic acid encoding a polypeptide, where the HMM bit score of the amino acid sequence of the polypeptide is greater than 50, the HMM based on the amino acid sequences depicted in one of FIGS. 1-14, where the regulatory region modulates transcription of the polynucleotide in the plant cell, and where a tissue of a plant produced from the plant cell has a difference in the level of oil as compared to the corresponding level in tissue of a control plant that does not comprise the nucleic acid.

[0043] In another aspect, a plant cell comprising an exogenous nucleic acid is provided. The exogenous nucleic acid comprises a regulatory region operably linked to a polynucleotide that is transcribed into an interfering RNA effective for inhibiting expression of a polypeptide having 80 percent or greater sequence identity to an amino acid sequence selected from the group consisting of SEQ ID NO:80, SEQ ID NOs:82-85, SEQ ID NOs:87-127, SEQ ID NOs:129-130, SEQ ID NOs:132-133, SEQ ID NOs:135-138, SEQ ID NOs:140-146, SEQ ID NOs:148-149, SEQ ID NO:151, SEQ ID NO:153, SEQ ID NOs:155-160, SEQ ID NOs:162-164, SEQ ID NO:166, SEQ ID NOs:168-171, SEQ ID NO:173, SEQ ID NOs:175-177, SEQ ID NOs:179-183, SEQ ID NOs:185-188, SEQ ID NOs:190-193, SEQ ID NOs:195-196, SEQ ID NOs:198-199, SEQ ID NO:201, SEQ ID NOs:203-214, SEQ ID NO:216, SEQ ID NO:218, SEQ ID NOs:220-227, SEQ ID NOs:229-230, SEQ ID NOs:232-235, SEQ ID NOs:237-243, SEQ ID NO:245, SEQ ID NOs:247-249, SEQ ID NO:309, SEQ ID NO:311, SEQ ID NO:313, SEQ ID NO:315, SEQ ID NOs:317-318, SEQ ID NOs:320-321, SEQ ID NO:323, SEQ ID NO:325, SEQ ID NO:327, SEQ ID NO:329, SEQ ID NOs:331-332, SEQ ID NOs:334-335, SEQ ID NOs:337-338, SEQ ID NOs:340-341, SEQ ID NOs:343-344, SEQ ID NO:346, SEQ ID NO:348, SEQ ID NO:350, SEQ ID NOs:352-353, SEQ ID NO:355, SEQ ID NO:357, SEQ ID NOs:359-360, SEQ ID NO:367, and SEQ ID NOs:415-441, where the regulatory region modulates transcription of the polynucleotide in the plant cell, and where a tissue of a plant produced from the plant cell has a difference in the level of oil as compared to the corresponding level in tissue of a control plant that does not comprise the nucleic acid.

[0044] The plant can be a dicot. The plant can be a member of the genus Anacardium, Arachis, Azadirachta, Brassica, Cannabis, Carthamus, Corylus, Crambe, Cucurbita, Glycine, Gossypium, Helianthus, Jatropha, Juglans, Linum, Olea, Papaver, Persea, Prunus, Ricinus, Sesamum, Simm ondsia, or Vitis. The plant can be a monocot. The plant can be a member of the genus Cocos, Elaeis, Oryza, or Zea. The plant can be a species selected from the group consisting of Miscanthus hybrid (Miscanthus×giganteus), Miscanthus sinensis, Miscanthus sacchariflorus, Panicum virgatum, Populus balsamifera, Sorghum bicolor, and Saccharum spp. The tissue can be seed tissue.

[0045] In another aspect, a transgenic plant is provided. The transgenic plant comprises any of the plant cells described above. Progeny of the transgenic plant are also provided. The progeny has a difference in the level of oil as compared to the level of oil in a corresponding control plant that does not comprise the exogenous nucleic acid. Seed, vegetative tissue, and fruit from the transgenic plant are also provided, as is a method of making oil. The method comprises extracting oil from the seed of the transgenic plant.

[0046] In another aspect, an isolated nucleic acid is provided. The isolated nucleic acid comprises a nucleotide sequence having 95% or greater sequence identity to a nucleotide sequence selected from the group consisting of SEQ ID NO:79, SEQ ID NO:81, SEQ ID NO:128, SEQ ID NO:131, SEQ ID NO:134, SEQ ID NO:139, SEQ ID NO:152, SEQ ID NO:154, SEQ ID NO:165, SEQ ID NO:167, SEQ ID NO:178, SEQ ID NO:194, SEQ ID NO:217, SEQ ID NO:219, SEQ ID NO:231, SEQ ID NO:236, SEQ ID NO:246, SEQ ID NOs:265-308, SEQ ID NO:310, SEQ ID NO:312, SEQ ID NO:314, SEQ ID NO:316, SEQ ID NO:319, SEQ ID NO:322, SEQ ID NO:324, SEQ ID NO:326, SEQ ID NO:328, SEQ ID NO:330, SEQ ID NO:333, SEQ ID NO:336, SEQ ID NO:339, SEQ ID NO:342, SEQ ID NO:345, SEQ ID NO:347, SEQ ID NO:349, SEQ ID NO:351, SEQ ID NO:354, SEQ ID NO:356, SEQ ID NO:358, SEQ ID NO:366, SEQ ID NO:368, SEQ ID NO:370, SEQ ID NO:372, SEQ ID NO:374, SEQ ID NO:376, SEQ ID NO:378, SEQ ID NO:380, and SEQ ID NO:413.

[0047] In another aspect, an isolated nucleic acid is provided. The isolated nucleic acid comprises a nucleotide sequence encoding a polypeptide having 80% or greater sequence identity to an amino acid sequence selected from the group consisting of SEQ ID NO:80, SEQ ID NO:82, SEQ ID NO:89, SEQ ID NO:90, SEQ ID NO:129, SEQ ID NO:132, SEQ ID NO:135, SEQ ID NO:140, SEQ ID NO:143, SEQ ID NO:149, SEQ ID NO:153, SEQ ID NOs:155-159, SEQ ID NOs:163-164, SEQ ID NO:166, SEQ ID NOs:168-171, SEQ ID NOs:176-177, SEQ ID NOs:179-181, SEQ ID NO:183, SEQ ID NO:186, SEQ ID NOs:191-192, SEQ ID NOs:195-196, SEQ ID NO:199, SEQ ID NOs:204-206, SEQ ID NOs:208-213, SEQ ID NO:218, SEQ ID NO:220, SEQ ID NOs:222-226, SEQ ID NO:230, SEQ ID NOs:232-233, SEQ ID NO:235, SEQ ID NO:237, SEQ ID NO:242, SEQ ID NO:247, SEQ ID NO:249, SEQ ID NO:309, SEQ ID NO:311, SEQ ID NO:313, SEQ ID NO:315, SEQ ID NO:317, SEQ ID NO:320, SEQ ID NO:323, SEQ ID NO:325, SEQ ID NO:327, SEQ ID NO:329, SEQ ID NO:331, SEQ ID NO:334, SEQ ID NO:337, SEQ ID NO:340, SEQ ID NO:343, SEQ ID NO:346, SEQ ID NO:348, SEQ ID NO:350, SEQ ID NO:352, SEQ ID NO:355, SEQ ID NO:357, SEQ ID NO:359, SEQ ID NO:367, SEQ ID NO:369, SEQ ID NO:371, SEQ ID NO:373, SEQ ID NO:375, SEQ ID NO:377, SEQ ID NO:379, SEQ ID NO:381, and SEQ ID NO:414.

[0048] In another aspect, a method of modulating the level of oleic acid in a plant is provided. The method comprises introducing into a plant cell an exogenous nucleic acid comprising a nucleotide sequence encoding a polypeptide, where the HMM bit score of the amino acid sequence of the polypeptide is greater than 235, the HMM based on the amino acid sequences depicted in FIG. 3, and where a tissue of a plant produced from the plant cell has a difference in the level of oleic acid as compared to the corresponding level in tissue of a control plant that does not comprise the exogenous nucleic acid.

[0049] In another aspect, a method of modulating the level of oleic acid in a plant is provided. The method comprises introducing into a plant cell an exogenous nucleic acid comprising a nucleotide-sequence encoding a polypeptide having 80 percent or greater sequence identity to the amino acid sequence set forth in SEQ ID NO:148, where a tissue of a plant produced from the plant cell has a difference in the level of oleic acid as compared to the corresponding level in tissue of a control plant that does not comprise the exogenous nucleic acid.

[0050] In another aspect, a method of modulating the level of oleic acid in a plant is provided. The method comprises introducing into a plant cell an exogenous nucleic acid comprising a nucleotide sequence having 80 percent or greater sequence identity to the nucleotide sequence set forth in SEQ ID NO:147, where a tissue of a plant produced from the plant cell has a difference in the level of oleic acid as compared to the corresponding level in tissue of a control plant that does not comprise the exogenous nucleic acid.

[0051] The difference can be an increase in the level of oleic acid. The exogenous nucleic acid can be operably linked to a regulatory region.

[0052] In another aspect, a method of modulating the level of oleic acid in a plant is provided. The method comprises introducing into a plant cell an exogenous nucleic acid comprising a regulatory region operably linked to a polynucleotide whose transcription product is at least 30 nucleotides in length and is complementary to a nucleic acid encoding a polypeptide, where the HMM bit score of the amino acid sequence of the polypeptide is greater than 235, the HMM based on the amino acid sequences depicted in FIG. 3, where the regulatory region modulates transcription of the polynucleotide in the plant cell, and where a tissue of a plant produced from the plant cell has a difference in the level of oleic acid as compared to the corresponding level in tissue of a control plant that does not comprise the exogenous nucleic acid.

[0053] In another aspect, a method of modulating the level of oleic acid in a plant is provided. The method comprises introducing into a plant cell an exogenous nucleic acid comprising a regulatory region operably linked to a polynucleotide that is transcribed into an interfering RNA effective for inhibiting expression of a polypeptide having 80 percent or greater sequence identity to the amino acid sequence set forth in SEQ ID NO:148, where the regulatory region modulates transcription of the polynucleotide in the plant cell, and where a tissue of a plant produced from the plant cell has a difference in the level of oleic acid as compared to the corresponding level in tissue of a control plant that does not comprise the exogenous nucleic acid. The exogenous nucleic acid can further comprise a 3′ UTR operably linked to the polynucleotide. The polynucleotide can be transcribed into an interfering RNA comprising a stem-loop structure. The stem-loop structure can comprise an inverted repeat of the 3′ UTR.

[0054] The difference can be a decrease in the level of oleic acid. The sequence identity can be 85 percent or greater, 90 percent or greater, or 95 percent or greater. The method can further comprise the step of producing a plant from the plant cell. The introducing step can comprise introducing the nucleic acid into a plurality of plant cells. The method can further comprise the step of producing a plurality of plants from the plant cells. The method can further comprise the step of selecting one or more plants from the plurality of plants that have the difference in the level of oleic acid. The regulatory region can be a tissue-preferential, broadly expressing, or inducible promoter.

[0055] In another aspect, a method of producing a plant tissue is provided. The method comprises growing a plant cell comprising an exogenous nucleic acid comprising a nucleotide sequence encoding a polypeptide, where the HMM bit score of the amino acid sequence of the polypeptide is greater than 235, the HMM based on the amino acid sequences depicted in FIG. 3, and where the tissue has a difference in the level of oleic acid as compared to the corresponding level in tissue of a control plant that does not comprise the exogenous nucleic acid.

[0056] In another aspect, a method of producing a plant tissue is provided. The method comprises growing a plant cell comprising an exogenous nucleic acid comprising a nucleotide sequence encoding a polypeptide having 80 percent or greater sequence identity to the amino acid sequence set forth in SEQ ID NO:148, where the tissue has a difference in the level of oleic acid as compared to the corresponding level in tissue of a control plant that does not comprise the nucleic acid.

[0057] In another aspect, a method of producing a plant tissue is provided. The method comprises growing a plant cell comprising an exogenous nucleic acid comprising a nucleotide sequence having 80 percent or greater sequence identity to the nucleotide sequence set forth in SEQ ID NO:147, where the tissue has a difference in the level of oleic acid as compared to the corresponding level in tissue of a control plant that does not comprise the nucleic acid.

[0058] In another aspect, a method of producing a plant tissue is provided. The method comprises growing a plant cell comprising an exogenous nucleic acid comprising a regulatory region operably linked to a polynucleotide whose transcription product is at least 30 nucleotides in length and is complementary to a nucleic acid encoding a polypeptide, where the HMM bit score of the amino acid sequence of the polypeptide is greater than 235, the HMM based on the amino acid sequences depicted in FIG. 3, where the regulatory region modulates transcription of the polynucleotide in the plant cell, and where the tissue has a difference in the level of oleic acid as compared to the corresponding level in tissue of a control plant that does not comprise the nucleic acid.

[0059] In another aspect, a method of producing a plant tissue is provided. The method comprises growing a plant cell comprising an exogenous nucleic acid comprising a regulatory region operably linked to a polynucleotide that is transcribed into an interfering RNA effective for inhibiting expression of a polypeptide having 80 percent or greater sequence identity to the amino acid sequence set forth in SEQ ID NO:148, where the regulatory region modulates transcription of the polynucleotide in the plant cell, and where the tissue has a difference in the level of oleic acid as compared to the corresponding level in tissue of a control plant that does not comprise the nucleic acid.

[0060] The plant can be a dicot. The plant can be a member of the genus Anacardium, Arachis, Azadirachta, Brassica, Cannabis, Carthamus, Corylus, Crambe, Cucurbita, Glycine, Gossypium, Helianthus, Jatropha, Juglans, Linum, Olea, Papaver, Persea, Prunus, Ricinus, Sesamum, Simmondsia, or Vitis. The plant can be a monocot. The plant can be a member of the genus Cocos, Elaeis, Oryza, or Zea. The plant can be a species selected from the group consisting of Miscanthus hybrid (Miscanthus×giganteus), Miscanthus sinensis, Miscanthus sacchariflorus, Panicum virgatum, Populus balsamifera, Sorghum bicolor, and Saccharum spp. The tissue can be seed tissue.

[0061] In another aspect, a plant cell comprising an exogenous nucleic acid is provided. The exogenous nucleic acid comprises a nucleotide sequence encoding a polypeptide, where the HMM bit score of the amino acid sequence of the polypeptide is greater than 235, the HMM based on the amino acid sequences depicted in FIG. 3, and where a tissue of a plant produced from the plant cell has a difference in the level of oleic acid as compared to the corresponding level in tissue of a control plant that does not comprise the nucleic acid.

[0062] In another aspect, a plant cell comprising an exogenous nucleic acid is provided. The exogenous nucleic acid comprises a nucleotide sequence encoding a polypeptide having 80 percent or greater sequence identity to the amino acid sequence set forth in SEQ ID NO:148, where a tissue of a plant produced from the plant cell has a difference in the level of oleic acid as compared to the corresponding level in tissue of a control plant that does not comprise the nucleic acid.

[0063] In another aspect, a plant cell comprising an exogenous nucleic acid is provided. The exogenous nucleic acid comprises a nucleotide sequence having 80 percent or greater sequence identity to the nucleotide sequence set forth in SEQ ID NO:147, where a tissue of a plant produced from the plant cell has a difference in the level of oleic acid as compared to the corresponding level in tissue of a control plant that does not comprise the nucleic acid.

[0064] In another aspect, a plant cell comprising an exogenous nucleic acid is provided. The exogenous nucleic acid comprises a regulatory region operably linked to a polynucleotide whose transcription product is at least 30 nucleotides in length and is complementary to a nucleic acid encoding a polypeptide, where the HMM bit score of the amino acid sequence of the polypeptide is greater than 235, the HMM based on the amino acid sequences depicted in FIG. 3, where the regulatory region modulates transcription of the polynucleotide in the plant cell, and where a tissue of a plant produced from the plant cell has a difference in the level of oleic acid as compared to the corresponding level in tissue of a control plant that does not comprise the nucleic acid.

[0065] In another aspect, a plant cell comprising an exogenous nucleic acid is provided. The exogenous nucleic acid comprises a regulatory region operably linked to a polynucleotide that is transcribed into an interfering RNA effective for inhibiting expression of a polypeptide having 80 percent or greater sequence identity to the amino acid sequence set forth in SEQ ID NO:148, where the regulatory region modulates transcription of the polynucleotide in the plant cell, and where a tissue of a plant produced from the plant cell has a difference in the level of oleic acid as compared to the corresponding level in tissue of a control plant that does not comprise the nucleic acid.

[0066] The plant can be a dicot. The plant can be a member of the genus Anacardium, Arachis, Azadirachta, Brassica, Cannabis, Carthamus, Corylus, Crambe, Cucurbita, Glycine, Gossypium, Helianthus, Jatropha, Juglans, Linum, Olea, Papaver, Persea, Prunus, Ricinus, Sesamum, Simmondsia, or Vitis. The plant can be a monocot. The plant can be a member of the genus Cocos, Elaeis, Oryza, or Zea. The plant can be a species selected from the group consisting of Miscanthus hybrid (Miscanthus×giganteus), Miscanthus sinensis, Miscanthus sacchariflorus, Panicum virgatum, Populus balsamifera, Sorghum bicolor, and Saccharum spp. The tissue can be seed tissue.

[0067] In another aspect, a transgenic plant is provided. The transgenic plant comprises any of the plant cells described above. Progeny of the transgenic plant are also provided. The progeny has a difference in the level of oleic acid as compared to the level of oleic acid in a corresponding control plant that does not comprise the exogenous nucleic acid. Seed, vegetative tissue, and fruit from the transgenic plant are also provided, as is a method of making oil. The method comprises extracting oil from the seed of the transgenic plant.

[0068] Unless otherwise defined, all technical and scientific terms used herein have the same meaning as commonly understood by one of ordinary skill in the art to which this invention pertains. Although methods and materials similar or equivalent to those described herein can be used to practice the invention, suitable methods and materials are described below. All publications, patent applications, patents, and other references mentioned herein are incorporated by reference in their entirety. In case of conflict, the present specification, including definitions, will control. In addition, the materials, methods, and examples are illustrative only and not intended to be limiting.

[0069] The details of one or more embodiments of the invention are set forth in the accompanying drawings and the description below. Other features, objects, and advantages of the invention will be apparent from the description and drawings, and from the claims.

### DESCRIPTION OF THE DRAWINGS

[0070] FIG. 1 is an alignment of Clone 625035 (SEQ ID NO:82) with homologous and/or orthologous amino acid sequences gi|32401273 (SEQ ID NO:83), gi|14140141 (SEQ ID NO:84), and Clone 1926437 (SEQ ID NO:343). FIG. 1 and the other alignment figures provided herein were generated using the program MUSCLE version 3.52 (Edgar, Nucleic Acids Res, 32(5):1792-97 (2004); World Wide Web at drive5.com/muscle).

[0071] FIG. 2 is an alignment of Clone 5344 (SEQ ID NO:87) with homologous and/or orthologous amino acid sequences gi|26094811 (SEQ ID NO:88), Clone 1411115 (SEQ ID NO:90), gi|3337095 (SEQ ID NO:91), gi|3337091 (SEQ ID NO:92), gi|18148925 (SEQ ID NO:93), gi|1617034 (SEQ ID NO:95), gi|3205177 (SEQ ID NO:96), gi|33469566 (SEQ ID NO:98), gi|3978580 (SEQ ID NO:101), gi|3978578 (SEQ ID NO:102), gi|19110472 (SEQ ID NO:103), gi|19110474 (SEQ ID NO:104), gi|9110478 (SEQ ID NO:105), gi|17221624 (SEQ ID NO:106), gi|58379364 (SEQ ID NO:109), gi|19110476 (SEQ ID NO:110), gi|1143381 (SEQ ID NO:111), gi|34068091 (SEQ ID NO:112), gi|54306529 (SEQ ID NO:114), gi|8778050 (SEQ ID NO:117), gi|57868641 (SEQ ID NO:118), gi|76365455 (SEQ ID NO:119), gi|33087508 (SEQ ID NO:120), gi|38234920 (SEQ ID NO:121), gi|33087506 (SEQ ID NO:122), gi|33087512 (SEQ ID NO:124), gi|40732890 (SEQ ID NO:126), gi|2460188 (SEQ ID NO:127), Annot 1534757 (SEQ ID NO:129), gi|1679733 (SEQ ID NO:130), gi|21667647 (SEQ ID NO:133), gi|469457 (SEQ ID NO:136), gi|13172312 (SEQ ID NO:137), gi|30984105 (SEQ ID NO:138), gi|20066308 (SEQ ID NO:141), gi|444011 (SEQ ID NO:142), Clone 784385 (SEQ ID NO:143), gi|55859509 (SEQ ID NO:144), and Clone 571162 (SEQ ID NO:249).

[0072] FIG. 3 is an alignment of Annot 828248_T (SEQ ID NO:360) with homologous and/or orthologous amino acid sequence Clone 948978 (SEQ ID NO:149).

[0073] FIG. 4 is an alignment of Annot 569483 (SEQ ID NO:151) with homologous and/or orthologous amino acid sequences Annot 1488415 (SEQ ID NO:153), Clone 524650 (SEQ ID NO:156), Clone 237720 (SEQ ID NO:157), Clone 703914 (SEQ ID NO:159), and gi|50881429 (SEQ ID NO:160).

[0074] FIG. 5 is an alignment of Annot 565281 (SEQ ID NO:162) with homologous and/or orthologous amino acid sequences Clone 952316 (SEQ ID NO:163), Clone 649261 (SEQ ID NO:164), Annot 1469350 (SEQ ID NO:166), Clone 234461 (SEQ ID NO:169), and Clone 1327188 (SEQ ID NO:171).

[0075] FIG. 6 is an alignment of Annot 542494 (SEQ ID NO:175) with homologous and/or orthologous amino acid sequences Clone 1369396 (SEQ ID NO:176), Clone 1102549 (SEQ ID NO:177), Annot 1515577 (SEQ ID NO:179), Clone 516401 (SEQ ID NO:180), Clone 618542 (SEQ ID NO:181), and gi|50940451 (SEQ ID NO:182).

[0076] FIG. 7 is an alignment of Annot 549258 (SEQ ID NO:185) with homologous and/or orthologous amino acid sequences Clone 945519 (SEQ ID NO:186) and gi|50935585 (SEQ ID NO:187).

[0077] FIG. 8 is an alignment of Annot 564261 (SEQ ID NO:190) with homologous and/or orthologous amino acid sequences Clone 947761 (SEQ ID NO:191), Clone 680759 (SEQ ID NO:192), gi|77549263 (SEQ ID NO:193), Annot 1486789 (SEQ ID NO:195), Clone 230678 (SEQ ID NO:196), Clone 1715450 (SEQ ID NO:311), Clone 1849790 (SEQ ID NO:315), and Clone 1795526 (SEQ ID NO:317).

[0078] FIG. 9 is an alignment of Annot 565548 (SEQ ID NO:198) with homologous and/or orthologous amino acid sequence Clone 976147 (SEQ ID NO:199).

[0079] FIG. 10 is an alignment of Clone 2721 (SEQ ID NO:203) with homologous and/or orthologous amino acid sequences Clone 871180 (SEQ ID NO:204), Clone 1767185 (SEQ ID NO:206), gi|1617213 (SEQ ID NO:207), Clone 772741 (SEQ ID NO:208), gi|1617206 (SEQ ID NO:318), Clone 1808894 (SEQ ID NO:320), and gi|1617197 (SEQ ID NO:321).

[0080] FIG. 11 is an alignment of Clone 30018 (SEQ ID NO:216) with homologous and/or orthologous amino acid sequences Annot 1488347 (SEQ ID NO:218), gi|633685 (SEQ ID NO:221), Clone 853331 (SEQ ID NO:222), Clone 208991 (SEQ ID NO:223), Clone 639802 (SEQ ID NO:226), gi|4775284 (SEQ ID NO:227), Clone 959117 (SEQ ID NO:323), Clone 1797853 (SEQ ID NO:329), Clone 1620853 (SEQ ID NO:331), gi|92867670 (SEQ ID NO:332), Clone 1955598 (SEQ ID NO:334), gill 174870 (SEQ ID NO:335), and Clone 1739308 (SEQ ID NO:337).

[0081] FIG. 12 is an alignment of Clone 36334 (SEQ ID NO:229) with homologous and/or orthologous amino acid sequences Clone 690176 (SEQ ID NO:230), Annot 1464715 (SEQ ID NO:232), gi|9587211 (SEQ ID NO:234), gi|45260636 (SEQ ID NO:238), gi|86279652 (SEQ ID NO:239), gi|60677685 (SEQ ID NO:241), Clone 339347 (SEQ ID NO:242), gi|70609692 (SEQ ID NO:338), and Clone 1786280 (SEQ ID NO:340).

[0082] FIG. 13 is an alignment of Clone 37493 (SEQ ID NO:245) with homologous and/or orthologous amino acid sequences Annot 1494370 (SEQ ID NO:247) and gi|50929439 (SEQ ID NO:248).

[0083] FIG. 14 is an alignment of Clone 590462 (SEQ ID NO:80) with homologous and/or orthologous amino acid sequences gi|114974_T (SEQ ID NO:415), gi|92881003_T (SEQ ID NO:416), gi|54290938_T (SEQ ID NO:417), gi|16757966_T (SEQ ID NO:418), gi|54401705_T (SEQ ID NO:420), Annot 1437978_T (SEQ ID NO:421), gi|6118076_T (SEQ ID NO:422), gi|32400332_T (SEQ ID NO:423), gi|110623260_T (SEQ ID NO:424), Clone 1777157_T (SEQ ID NO:425), Clone 732610_T (SEQ ID NO:426), Clone 1926430_T (SEQ ID NO:427), gi|6840855_T (SEQ ID NO:428), Clone 327253_T (SEQ ID NO:429), gi|249262_T (SEQ ID NO:430), gi|28628597_T (SEQ ID NO:431), gi|127734_T (SEQ ID NO:433), gi|17226270_T (SEQ ID NO:434), gi|127733_T (SEQ ID NO:437), gi|71361195_T (SEQ ID NO:439), gi|56112345_T (SEQ ID NO:440), and gill 1034734_T (SEQ ID NO:441).

[0084] FIG. 15 is an alignment of Clone 590462_FL (SEQ ID NO:414) with homologous and/or orthologous amino acid sequences Annot 1437978 (SEQ ID NO:369), Clone 1777157 (SEQ ID NO:373), Clone 1926430 (SEQ ID NO:377), Clone 327253 (SEQ ID NO:379), Clone 732610 (SEQ ID NO:381), gi|11034734 (SEQ ID NO:382), gi|110623260 (SEQ ID NO:384), gi|114974 (SEQ ID NO:385), gill 155255 (SEQ ID NO:386), gi|12621052 (SEQ ID NO:387), gi|127733 (SEQ ID NO:388), gi|127734 (SEQ ID NO:389), gi|15778634 (SEQ ID NO:390), gi|17226270 (SEQ ID NO:392), gi|249262 (SEQ ID NO:393), gi|28628597 (SEQ ID NO:394), gi|32400332 (SEQ ID NO:395), gi|54290938 (SEQ ID NO:398), gi|54401705 (SEQ ID NO:399), gi|56112345 (SEQ ID NO:400), gi|56130949 (SEQ ID NO:401), gi|6103585 (SEQ ID NO:403), gi|6118076 (SEQ ID NO:404), gi|62131643 (SEQ ID NO:405), gi|6840855 (SEQ ID NO:406), gi|71361195 (SEQ ID NO:407), gi|74473455 (SEQ ID NO:408), gi|84316715 (SEQ ID NO:409), and gi|92881003 (SEQ ID NO:412).

### DETAILED DESCRIPTION

[0085] The invention features methods and materials related to modulating (e.g., increasing or decreasing) oil levels in plants. In some embodiments, the plants may also have modulated levels of protein. The methods can include transforming a plant cell with a nucleic acid encoding an oil-modulating polypeptide, wherein expression of the polypeptide results in a modulated level of oil. Plant cells produced using such methods can be grown to produce plants having an increased or decreased oil content. Seeds from such plants may be used to produce, for example, foodstuffs and animal feed having an increased oil content. Producing oil from seeds having an increased oil content can allow manufacturers to increase oil yields.

### Polypeptides

[0086] The term “polypeptide” as used herein refers to a compound of two or more subunit amino acids, amino acid analogs, or other peptidomimetics, regardless of post-translational modification, e.g., phosphorylation or glycosylation. The subunits may be linked by peptide bonds or other bonds such as, for example, ester or ether bonds. The term “amino acid” refers to natural and/or unnatural or synthetic amino acids, including D/L optical isomers. Full-length proteins, analogs, mutants, and fragments thereof are encompassed by this definition.

[0087] Polypeptides described herein include oil-modulating polypeptides. Oil-modulating polypeptides can be effective to modulate oil levels when expressed in a plant or plant cell. Modulation of the level of oil can be either an increase or a decrease in the level of oil relative to the corresponding level in a control plant.

[0088] An oil-modulating polypeptide can contain an AP2 domain characteristic of polypeptides belonging to the AP2/EREBP family of plant transcription factor polypeptides. AP2 (APETALA2) and EREBPs (ethylene-responsive element binding proteins) are prototypic members of a family of transcription factors unique to plants, whose distinguishing characteristic is that they contain the so-called AP2 DNA binding domain. AP2/EREBP genes form a large multigene family encoding polypeptides that play a variety of roles throughout the plant life cycle: from being key regulators of several developmental processes, such as floral organ identity determination and control of leaf epidermal cell identity, to forming part of the mechanisms used by plants to respond to various types of biotic and environmental stress.

[0089] SEQ ID NO:82 sets forth the amino acid sequence of a Glycine max clone, identified herein as Ceres CLONE ID no. 625035 (SEQ ID NO:81), that is predicted to encode an AP2/EREBP transcription factor polypeptide. An oil-modulating polypeptide can comprise the amino acid sequence set forth in SEQ ID NO:82. Alternatively, an oil-modulating polypeptide can be a homolog, ortholog, or variant of the polypeptide having the amino acid sequence set forth in SEQ ID NO:82. For example, an oil-modulating polypeptide can have an amino acid sequence with at least 50% sequence identity, e.g., 51%, 55%, 60%, 65%, 70%, 75%, 80%, 85%, 90%, 95%, 97%, 98%, or 99% sequence identity, to the amino acid sequence set forth in SEQ ID NO:82.

[0090] Amino acid sequences of homologs and/or orthologs of the polypeptide having the amino acid sequence set forth in SEQ ID NO:82 are provided in FIG. 1. The alignment in FIG. 1 provides the amino acid sequences of Clone 625035 (SEQ ID NO:82), gi|32401273 (SEQ ID NO:83), gi|14140141 (SEQ ID NO:84), and Clone 1926437 (SEQ ID NO:343). Other homologs and/or orthologs include gi|50911399 (SEQ ID NO:85) and gi|7528276 (SEQ ID NO:341).

[0091] In some cases, an oil-modulating polypeptide includes a polypeptide having at least 80% sequence identity, e.g., 80%, 85%, 90%, 95%, 97%, 98%, or 99% sequence identity, to an amino acid sequence corresponding to SEQ ID NO:83, SEQ ID NO:84, SEQ ID NO:85, SEQ ID NO:341, or SEQ ID NO:343.

[0092] An oil-modulating polypeptide can contain a leucine-rich repeat, such as LRR_{—}1. Leucine-rich repeats (LRR) consist of 2-45 motifs of 20-30 amino acids that generally fold into an arc or horseshoe shape and are often flanked by cysteine rich domains. Each LRR is composed of a beta-alpha unit. LRRs appear to provide a structural framework for the formation of protein-protein interactions. Polypeptides containing LRRs include tyrosine kinase receptors, cell-adhesion molecules, virulence factors, and extracellular matrix-binding glycoproteins that are involved in a variety of biological processes, including signal transduction, cell adhesion, DNA repair, recombination, transcription, RNA processing, and disease resistance.

[0093] SEQ ID NO:87 sets forth the amino acid sequence of an Arabidopsis clone, identified herein as Ceres CLONE ID no. 5344 (SEQ ID NO:86), that is predicted to encode a polypeptide containing a leucine-rich repeat. An oil-modulating polypeptide can comprise the amino acid sequence set forth in SEQ ID NO: 87. Alternatively, an oil-modulating polypeptide can be a homolog, ortholog, or variant of the polypeptide having the amino acid sequence set forth in SEQ ID NO:87. For example, an oil-modulating polypeptide can have an amino acid sequence with at least 45% sequence identity, e.g., 45%, 50%, 55%, 60%, 65%, 70%, 75%, 80%, 85%, 90%, 95%, 97%, 98%, or 99% sequence identity, to the amino acid sequence set forth in SEQ ID NO:87.

[0094] Amino acid sequences of homologs and/or orthologs of the polypeptide having the amino acid sequence set forth in SEQ ID NO:87 are provided in FIG. 2. The alignment in FIG. 2 provides the amino acid sequences of Clone 5344 (SEQ ID NO:87), gi|26094811 (SEQ ID NO:88), Clone 1411115 (SEQ ID NO:90), gi|3337095 (SEQ ID NO:91), gi|3337091 (SEQ ID NO:92), gill 8148925 (SEQ ID NO:93), gi|1617034 (SEQ ID NO:95), gi|3205177 (SEQ ID NO:96), gi|33469566 (SEQ ID NO:98), gi|3978580 (SEQ ID NO:101), gi|3978578 (SEQ ID NO:102), gi|19110472 (SEQ ID NO:103), gi|19110474 (SEQ ID NO:104), gi|19110478 (SEQ ID NO:105), gi|17221624 (SEQ ID NO:106), gi|58379364 (SEQ ID NO:109), gi|19110476 (SEQ ID NO:110), gi 1143381 (SEQ ID NO:111), gi|34068091 (SEQ ID NO:112), gi|54306529 (SEQ ID NO:114), gi|8778050 (SEQ ID NO:117), gi|57868641 (SEQ ID NO:118), gi|76365455 (SEQ ID NO:119), gi|33087508 (SEQ ID NO:120), gi|38234920 (SEQ ID NO:121), gi|33087506 (SEQ ID NO:122), gi|33087512 (SEQ ID NO:124), gi|40732890 (SEQ ID NO:126), gi|2460188 (SEQ ID NO:127), Annot 1534757 (SEQ ID NO:129), gi|1679733 (SEQ ID NO:130), gi|21667647 (SEQ ID NO:133), gi|469457 (SEQ ID NO:136), gi|13172312 (SEQ ID NO:137), gi|30984105 (SEQ ID NO:138), gi|20066308 (SEQ ID NO:141), gi|444011 (SEQ ID NO:142), Clone 784385 (SEQ ID NO:143), gi|55859509 (SEQ ID NO:144), and Clone 571162 (SEQ ID NO:249). Other homologs and/or orthologs include Ceres CLONE ID no. 1301219 (SEQ ID NO:89), Public GI no. 3242641 (SEQ ID NO:94), Public GI no. 18148376 (SEQ ID NO:97), Public GI no. 3337093 (SEQ ID NO:99), Public GI no. 18148923 (SEQ ID NO:100), Public GI no. 3192102 (SEQ ID NO:107), Public GI no. 17221626 (SEQ ID NO:108), Public GI no. 58379362 (SEQ ID NO:113), Public GI no. 58379372 (SEQ ID NO:115), Public GI no. 6651282 (SEQ ID NO:116), Public GI no. 63099931 (SEQ ID NO:123), Public GI no. 33087510 (SEQ ID NO:125), Ceres ANNOT ID no. 1481274 (SEQ ID NO:132), Ceres ANNOT ID no. 1528311 (SEQ ID NO:135), Ceres ANNOT ID no. 1474878 (SEQ ID NO:140), Public GI no. 50871748 (SEQ ID NO:145), Public GI no. 55859507 (SEQ ID NO:146), Public GI ID no. 33469564 (SEQ ID NO:344) and Ceres CLONE ID no. 1820701 (SEQ ID NO:346).

[0095] In some cases, an oil-modulating polypeptide includes a polypeptide having at least 80% sequence identity, e.g., 80%, 85%, 90%, 95%, 97%, 98%, or 99% sequence identity, to an amino acid sequence corresponding to SEQ ID NO:88, SEQ ID NO:89, SEQ ID NO:90, SEQ ID NO:91, SEQ ID NO:92, SEQ ID NO:93, SEQ ID NO:94, SEQ ID NO:95, SEQ ED NO:96, SEQ ID NO:97, SEQ ID NO:98, SEQ ID NO:99, SEQ ID NO:100, SEQ ID NO:101, SEQ ID NO:102, SEQ ID NO:103, SEQ ID NO:104, SEQ ID NO:105, SEQ ID NO:106, SEQ ID NO:107, SEQ ID NO:108, SEQ ID NO:109, SEQ ID NO:110, SEQ ID NO:111, SEQ ID NO:112, SEQ ID NO:113, SEQ ID NO:114, SEQ ID NO:115, SEQ ID NO:116, SEQ ID NO:117, SEQ ID NO:118, SEQ ID NO:119, SEQ ID NO:120, SEQ ID NO:121, SEQ ID NO:122, SEQ ID NO:123, SEQ ID NO:124, SEQ BD NO:125, SEQ ID NO:126, SEQ ID NO:127, SEQ ID NO:129, SEQ ID NO:130, SEQ ID NO:132, SEQ ID NO:133, SEQ ID NO:135, SEQ ID NO:136, SEQ ID NO:137, SEQ ID NO:138, SEQ ID NO:140, SEQ ID NO:141, SEQ ID NO:142, SEQ ID NO:143, SEQ ID NO:144, SEQ ID NO:145, SEQ ID NO:146, SEQ ID NO:249, SEQ ID NO:344, or SEQ ID NO:346.

[0096] An oil-modulating polypeptide can contain an ankyrin repeat. The ankyrin repeat is one of the most common protein-protein interaction motifs in nature. Ankyrin repeats are tandemly repeated modules of about 33 amino acids. The repeat has been found in polypeptides of diverse function such as transcriptional initiators, cell-cycle regulators, cytoskeletal, ion transporters and signal transducers. Each repeat folds into a helix-loop-helix structure with a beta-hairpin/loop region projecting out from the helices at a 90 degree angle. The repeats stack together to form an L-shaped structure.

[0097] SEQ ID NO:148 sets forth the amino acid sequence of an Arabidopsis clone, identified herein as Ceres CDNA ID no. 23649975 (SEQ ID NO:147), that is predicted to encode a polypeptide containing an ankyrin repeat. An oil-modulating polypeptide can comprise the amino acid sequence set forth in SEQ ID NO:148. Alternatively, an oil-modulating polypeptide can be a homolog, ortholog, or variant of the polypeptide having the amino acid sequence set forth in SEQ ID NO:148. For example, an oil-modulating polypeptide can have an amino acid sequence with at least 70% sequence identity, e.g., 75%, 80%, 85%, 90%, 95%, 97%, 98%, or 99% sequence identity, to the amino acid sequence set forth in SEQ ID NO:148.

[0098] The amino acid sequences of homologs and/or orthologs of the polypeptide having the amino acid sequence set forth in SEQ ID NO:148 are provided in FIG. 3. The alignment in FIG. 3 provides the amino acid sequences of Annot 828248_T (SEQ ID NO:360) and Clone 948978 (SEQ ID NO:149).

[0099] In some cases, an oil-modulating polypeptide includes a polypeptide having at least 80% sequence identity, e.g., 80%, 85%, 90%, 95%, 97%, 98%, or 99% sequence identity, to an amino acid sequence corresponding to SEQ ID NO:149 or SEQ ID NO:360.

[0100] An oil-modulating polypeptide can contain a glycosyltransferase family 28 C-terminal domain, Glyco_tran_{—}28_C, characteristic of a glycosyltransferase polypeptide belonging to the glycosyltransferase family 28. Glycosyltransferase polypeptides are enzymes that catalyze the transfer of sugar moieties from activated donor molecules to specific acceptor molecules, forming glycosidic bonds. Glycosyltransferase family 28 comprises enzymes with a number of known activities: 1,2-diacylglycerol 3-beta-galactosyltransferase, 1,2-diacylglycerol 3-beta-glucosyltransferase, and beta-N-acetylglucosamine transferase. Results of structural analyses suggest that the C-terminal domain contains the UDP-GlcNAc binding site. The 3-D structures of glycosyltransferase polypeptides are better conserved than the sequences of glycosyltransferase polypeptides.

[0101] SEQ ID NO:162 sets forth the amino acid sequence of an Arabidopsis clone, identified herein as Ceres CDNA ID no. 12706677 (SEQ ID NO:161), that is predicted to encode a glycosyltransferase polypeptide. An oil-modulating polypeptide can comprise the amino acid sequence set forth in SEQ ID NO:162. Alternatively, an oil-modulating polypeptide can be a homolog, ortholog, or variant of the polypeptide having the amino acid sequence set forth in SEQ ID NO:162. For example, an oil-modulating polypeptide can have an amino acid sequence with at least 60% sequence identity, e.g., 61%, 65%, 70%, 75%, 80%, 85%, 90%, 95%, 97%, 98%, or 99% sequence identity, to the amino acid sequence set forth in SEQ ID NO:162.

[0102] Amino acid sequences of homologs and/or orthologs of the polypeptide having the amino acid sequence set forth in SEQ ID NO:162 are provided in FIG. 5. The alignment in FIG. 5 provides the amino acid sequences of Annot 565281 (SEQ ID NO:162), Clone 952316 (SEQ ID NO:163), Clone 649261 (SEQ ID NO:164), Annot 1469350 (SEQ ID NO:166), Clone 234461 (SEQ ID NO:169), and Clone 1327188 (SEQ ID NO:171). Other homologs and/or orthologs include Ceres ANNOT ID no. 1488942 (SEQ ID NO:168), Ceres CLONE ID no. 217678 (SEQ ID NO:170), Ceres CLONE ID no. 1831965 (SEQ ID NO:355), Ceres CLONE ID no. 1770078 (SEQ ID NO:357), and Ceres CLONE ID no. 2008759 (SEQ ID NO:359).

[0103] In some cases, an oil-modulating polypeptide includes a polypeptide having at least 80% sequence identity, e.g., 80%, 85%, 90%, 95%, 97%, 98%, or 99% sequence identity, to an amino acid sequence corresponding to SEQ ID NO:163, SEQ ID NO:164, SEQ ID NO:166, SEQ ID NO:168, SEQ ID NO:169, SEQ ID NO:170, SEQ ID NO:171, SEQ ID NO:355, SEQ ID NO:357, or SEQ ID NO:359.

[0104] An oil-modulating polypeptide can contain an Acetyltransf_{—}1 domain. The Acetyltransf_{—}1 domain is characteristic of polypeptides belonging to the acetyltransferase (GNAT) family. The GNAT family includes GcnS-related acetyltransferases, which catalyze the transfer of an acetyl group from acetyl-CoA to the lysine E-amino groups on the N-terminal tails of histones. Many GNATs share several functional domains, including an N-terminal region of variable length, an acetyltransferase domain encompassing conserved sequence motifs, a region that interacts with the coactivator Ada2, and a C-terminal bromodomain that is believed to interact with acetyl-lysine residues. Members of the GNAT family are important for the regulation of cell growth and development. The importance of GNATs is probably related to their role in transcription and DNA repair. SEQ ID NO:185 sets forth the amino acid sequence of an Arabidopsis clone, identified herein as Ceres ANNOT ID no. 549258 (SEQ ID NO:362), that is predicted to encode an acetyltransferase polypeptide. An oil-modulating polypeptide can comprise the amino acid sequence set forth in SEQ ID NO:185. Alternatively, an oil-modulating polypeptide can be a homolog, ortholog, or variant of the polypeptide having the amino acid sequence set forth in SEQ ID NO:185. For example, an oil-modulating polypeptide can have an amino acid sequence with at least 55% sequence identity, e.g., 55%, 60%, 65%, 70%, 75%, 80%, 85%, 90%, 95%, 97%, 98%, or 99% sequence identity, to the amino acid sequence set forth in SEQ ID NO:185.

[0105] Amino acid sequences of homologs and/or orthologs of the polypeptide having the amino acid sequence set forth in SEQ ID NO:185 are provided in FIG. 7.

[0106] The alignment in FIG. 7 provides the amino acid sequences of Annot 549258 (SEQ ID NO:185), Clone 945519 (SEQ ID NO:186), and gi|50935585 (SEQ ID NO:187). Other homologs and/or orthologs include Public GI no. 51963354 (SEQ ID NO:188).

[0107] In some cases, an oil-modulating polypeptide includes a polypeptide having at least 80% sequence identity, e.g., 80%, 85%, 90%, 95%, 97%, 98%, or 99% sequence identity, to an amino acid sequence corresponding to SEQ ID NO:186, SEQ ID NO:187, SEQ ID NO:188.

[0108] An oil-modulating polypeptide can contain a DnaJ domain associated with chaperone polypeptides involved in protein folding. SEQ ID NO:190 sets forth the amino acid sequence of an Arabidopsis clone, identified herein as Ceres ANNOT ID no. 564261 (SEQ ID NO:364), that is predicted to encode a polypeptide containing a DnaJ domain. An oil-modulating polypeptide can comprise the amino acid sequence set forth in SEQ ID NO:190. Alternatively, an oil-modulating polypeptide can be a homolog, ortholog, or variant of the polypeptide having the amino acid sequence set forth in SEQ ID NO:190. For example, an oil-modulating polypeptide can have an amino acid sequence with at least 55% sequence identity, e.g., 55%, 60%, 65%, 70%, 75%, 80%, 85%, 90%, 95%, 97%, 98%, or 99% sequence identity, to the amino acid sequence set forth in SEQ ID NO:190.

[0109] Amino acid sequences of homologs and/or orthologs of the polypeptide having the amino acid sequence set forth in SEQ ID NO:190 are provided in FIG. 8. The alignment in FIG. 8 provides the amino acid sequences of Annot 564261 (SEQ ID NO:190), Clone 947761 (SEQ ID NO:191), Clone 680759 (SEQ ID NO:192), gi|77549263 (SEQ ID NO:193), Annot 1486789 (SEQ ID NO:195), Clone 230678 (SEQ ID NO:196), Clone 1715450 (SEQ ID NO:311), Clone 1849790 (SEQ ID NO:315), and Clone 1795526 (SEQ ID NO:317).

[0110] In some cases, an oil-modulating polypeptide includes a polypeptide having at least 80% sequence identity, e.g., 80%, 85%, 90%, 95%, 97%, 98%, or 99% sequence identity, to an amino acid sequence corresponding to SEQ ID NO:191, SEQ ID NO:192, SEQ ID NO:193, SEQ ID NO:195, SEQ ID NO:196, SEQ ID NO:311, SEQ ID NO:315, or SEQ ID NO:317.

[0111] An oil-modulating polypeptide can have a Rho_N domain found in the N-terminus of the Rho termination factor. The Rho termination factor disengages newly transcribed RNA from its DNA template at certain, specific transcripts. It is thought that two copies of Rho bind to RNA and that Rho functions as a hexamer of protomers.

[0112] SEQ ID NO:198 sets forth the amino acid sequence of an Arabidopsis clone, identified herein as Ceres ANNOT ID no. 565548 (SEQ ID NO:365), that is predicted to encode a polypeptide containing a Rho_N domain. An oil-modulating polypeptide can comprise the amino acid sequence set forth in SEQ ID NO:198. Alternatively, an oil-modulating polypeptide can be a homolog, ortholog, or variant of the polypeptide having the amino acid sequence set forth in SEQ ID NO:198. For example, an oil-modulating polypeptide can have an amino acid sequence with at least 60% sequence identity, e.g., 60%, 65%, 70%, 75%, 80%, 85%, 90%, 95%, 97%, 98%, or 99% sequence identity, to the amino acid sequence set forth in SEQ ID NO:198.

[0113] The amino acid sequence of a homolog and/or ortholog of the polypeptide having the amino acid sequence set forth in SEQ ID NO:198 is provided in FIG. 9. The alignment in FIG. 9 provides the amino acid sequences of Annot 565548 (SEQ ID NO:198) and Clone 976147 (SEQ ID NO:199).

[0114] In some cases, an oil-modulating polypeptide includes a polypeptide having at least 80% sequence identity, e.g., 80%, 85%, 90%, 95%, 97%, 98%, or 99% sequence identity, to an amino acid sequence corresponding to SEQ ID NO:199.

[0115] An oil-modulating polypeptide can have an Exo_endo_phos domain characteristic of polypeptides belonging to the endonuclease/exonuclease/phosphatase family of polypeptides. This large family of polypeptides includes magnesium dependent endonucleases and phosphatases involved in intracellular signaling. For example, the endonuclease/exonuclease/phosphatase family includes AP endonuclease proteins, DNase I proteins, and Synaptojanin, an inositol-1,4,5-trisphosphate phosphatase.

[0116] SEQ ID NO:201 sets forth the amino acid sequence of an Arabidopsis clone, identified herein as Ceres ANNOT ID no. 841273 (SEQ ID NO:363), that is predicted to encode a polypeptide containing an Exo_endo_phos domain. An oil-modulating polypeptide can comprise the amino acid sequence set forth in SEQ ID NO:201. Alternatively, an oil-modulating polypeptide can be a homolog, ortholog, or variant of the polypeptide having the amino acid sequence set forth in SEQ ID NO:201. For example, an oil-modulating polypeptide can have an amino acid sequence with at least 40% sequence identity, e.g., 40%, 45%, 50%, 55%, 60%, 65%, 70%, 75%, 80%, 85%, 90%, 95%, 97%, 98%, or 99% sequence identity, to the amino acid sequence set forth in SEQ ID NO:201.

[0117] An oil-modulating polypeptide can contain a UCR_UQCRX_QCR9 domain characteristic of a ubiquinol-cytochrome C reductase, UQCRX/QCR9 like polypeptide. The UQCRX/QCR9 polypeptide is part of the mitochondrial respiratory chain. SEQ ID NO:216 sets forth the amino acid sequence of an Arabidopsis clone, identified herein as Ceres CLONE ID no. 30018 (SEQ ID NO:215), that is predicted to encode a polypeptide containing a UCR_UQCRX_QCR9 domain. An oil-modulating polypeptide can comprise the amino acid sequence set forth in SEQ ID NO:216. Alternatively, an oil-modulating polypeptide can be a homolog, ortholog, or variant of the polypeptide having the amino acid sequence set forth in SEQ ID NO:216. For example, an oil-modulating polypeptide can have an amino acid sequence with at least 40% sequence identity, e.g., 41%, 45%, 50%, 55%, 60%, 65%, 70%, 75%, 80%, 85%, 90%, 95%, 97%, 98%, or 99% sequence identity, to the amino acid sequence set forth in SEQ ID NO:216.

[0118] Amino acid sequences of homologs and/or orthologs of the polypeptide having the amino acid sequence set forth in SEQ ID NO:216 are provided in FIG. 11. The alignment in FIG. 11 provides the amino acid sequences of Clone 30018 (SEQ ID NO:216), Annot 1488347 (SEQ ID NO:218), gi|633685 (SEQ ID NO:221), Clone 853331 (SEQ ID NO:222), Clone 208991 (SEQ ID NO:223), Clone 639802 (SEQ ID NO:226), gi|4775284 (SEQ ID NO:227), Clone 959117 (SEQ ID NO:323), Clone 1797853 (SEQ ID NO:329), Clone 1620853 (SEQ ID NO:331), gi|92867670 (SEQ ID NO:332), Clone 1955598 (SEQ ID NO:334), gi|1174870 (SEQ ID NO:335), and Clone 1739308 (SEQ ID NO:337). Other homologs and/or orthologs include Ceres ANNOT ID no. 1513719 (SEQ ID NO:220), Ceres CLONE ID no. 336493 (SEQ ID NO:224), Ceres CLONE ID no. 1064967 (SEQ ID NO:225), Ceres CLONE ID no. 1090391 (SEQ ID NO:325), and Ceres CLONE ID no. 1270157 (SEQ ID NO:327).

[0119] In some cases, an oil-modulating polypeptide includes a polypeptide having at least 80% sequence identity, e.g., 80%, 85%, 90%, 95%, 97%, 98%, or 99% sequence identity, to an amino acid sequence corresponding to SEQ ID NO:218, SEQ ID NO:220, SEQ ID NO:221, SEQ ID NO:222, SEQ ID NO:223, SEQ ID NO:224, SEQ ID NO:225, SEQ ID NO:226, SEQ ID NO:227, SEQ ID NO:323, SEQ ID NO:325, SEQ ID NO:327, SEQ ID NO:329, SEQ ID NO:331, SEQ ID NO:332, SEQ ID NO:334, SEQ ID NO:335, or SEQ ID NO:337.

[0120] An oil-modulating polypeptide can contain a p450 domain characteristic of a cytochrome P450 polypeptide. The cytochrome P450 enzymes constitute a superfamily of haem-thiolate proteins. P450 enzymes usually act as terminal oxidases in multicomponent electron transfer chains, called P450-containing monooxygenase systems, and are involved in metabolism of a plethora of both exogenous and endogenous compounds. The conserved core is composed of a coil referred to as the “meander,” a four-helix bundle, helices J and K, and two sets of beta-sheets. These regions constitute the haem-binding loop (with an absolutely conserved cysteine that serves as the 5th ligand for the haem iron), the proton-transfer groove, and the absolutely conserved EXXR motif in helix K.

[0121] SEQ ID NO:229 sets forth the amino acid sequence of an Arabidopsis clone, identified herein as Ceres CLONE ID no. 36334 (SEQ ID NO:228), that is predicted to encode a cytochrome P450 polypeptide. An oil-modulating polypeptide can comprise the amino acid sequence set forth in SEQ ID NO:229. Alternatively, an oil-modulating polypeptide can be a homolog, ortholog, or variant of the polypeptide having the amino acid sequence set forth in SEQ ID NO:229. For example, an oil-modulating polypeptide can have an amino acid sequence with at least 55% sequence identity, e.g., 60%, 65%, 70%, 75%, 80%, 85%, 90%, 95%, 97%, 98%, or 99% sequence identity, to the amino acid sequence set forth in SEQ ID NO:229.

[0122] Amino acid sequences of homologs and/or orthologs of the polypeptide having the amino acid sequence set forth in SEQ ID NO:229 are provided in FIG. 12. The alignment in FIG. 12 provides the amino acid sequences of Clone 36334 (SEQ ID NO:229), Clone 690176 (SEQ ID NO:230), Annot 1464715 (SEQ ID NO:232), gi|9587211 (SEQ ID NO:234), gi|45260636 (SEQ ID NO:238), gi|86279652 (SEQ ID NO:239), gi|60677685 (SEQ ID NO:241), Clone 339347 (SEQ ID NO:242), gi|70609692 (SEQ ID NO:338), and Clone 1786280 (SEQ ID NO:340). Other homologs and/or orthologs include Ceres CLONE ID no. 574698 (SEQ ID NO:233), Ceres CLONE ID no. 718939 (SEQ ID NO:235), Ceres ANNOT ID no. 1511511 (SEQ ID NO:237), Public GI no. 71834072 (SEQ ID NO:240), and Public GI no. 77548615 (SEQ ID NO:243).

[0123] In some cases, an oil-modulating polypeptide includes a polypeptide having at least 80% sequence identity, e.g., 80%, 85%, 90%, 95%, 97%, 98%, or 99% sequence identity, to an amino acid sequence corresponding to SEQ ID NO:230, SEQ ID NO:232, SEQ ID NO:233, SEQ ID NO:234, SEQ ID NO:235, SEQ ID NO:237, SEQ ID NO:238, SEQ ID NO:239, SEQ ID NO:240, SEQ ID NO:241, SEQ ID NO:242, SEQ ID NO:243, SEQ ID NO:338, or SEQ ID NO:340.

[0124] An oil-modulating polypeptide can contain a Methyltransferase_{—}7 domain characteristic of a SAM dependent carboxyl methyltransferase polypeptide. The SAM dependent carboxyl methyltransferase family of plant methyltransferase polypeptides contains enzymes that act on a variety of substrates including salicylic acid, jasmonic acid and 7-methylxanthine.

[0125] SEQ ID NO:245 sets forth the amino acid sequence of an Arabidopsis clone, identified herein as Ceres CLONE ID no. 37493 (SEQ ID NO:244), that is predicted to encode a methyltransferase polypeptide. An oil-modulating polypeptide can comprise the amino acid sequence set forth in SEQ ID NO:245. Alternatively, an oil-modulating polypeptide can be a homolog, ortholog, or variant of the polypeptide having the amino acid sequence set forth in SEQ ID NO:245. For example, an oil-modulating polypeptide can have an amino acid sequence with at least 60% sequence identity, e.g., 60%, 65%, 70%, 75%, 80%, 85%, 90%, 95%, 97%, 98%, or 99% sequence identity, to the amino acid sequence set forth in SEQ ID NO:245.

[0126] Amino acid sequences of homologs and/or orthologs of the polypeptide having the amino acid sequence set forth in SEQ ID NO:245 are provided in FIG. 13. The alignment in FIG. 13 provides the amino acid sequences of Clone 37493 (SEQ ID NO:245), Annot 1494370 (SEQ ID NO:247), and gi|50929439 (SEQ ID NO:248).

[0127] In some cases, an oil-modulating polypeptide includes a polypeptide having at least 80% sequence identity, e.g., 80%, 85%, 90%, 95%, 97%, 98%, or 99% sequence identity, to an amino acid sequence corresponding to SEQ ID NO:247 or SEQ ID NO:248.

[0128] An oil-modulating polypeptide can contain a CP12 domain. The CP12 domain contains three conserved cysteines and a histidine, which suggests that the CP12 domain may be a zinc binding domain. SEQ ID NO:203 sets forth the amino acid sequence of an Arabidopsis clone, identified herein as Ceres CLONE ID no. 2721 (SEQ ID NO:202), that is predicted to encode a polypeptide containing a CP12 domain. An oil-modulating polypeptide can comprise the amino acid sequence set forth in SEQ ID NO:203. Alternatively, an oil-modulating polypeptide can be a homolog, ortholog, or variant of the polypeptide having the amino acid sequence set forth in SEQ ID NO:203. For example, an oil-modulating polypeptide can have an amino acid sequence with at least 50% sequence identity, e.g., 55%, 60%, 65%, 70%, 75%, 80%, 85%, 90%, 95%, 97%, 98%, or 99% sequence identity, to the amino acid sequence set forth in SEQ ID NO:203.

[0129] Amino acid sequences of homologs and/or orthologs of the polypeptide having the amino acid sequence set forth in SEQ ID NO:203 are provided in FIG. 10. The alignment in FIG. 10 provides the amino acid sequences of Clone 2721 (SEQ ID NO:203), Clone 871180 (SEQ ID NO:204), Clone 1767185 (SEQ ID NO:206), gi|617213 (SEQ ID NO:207), Clone 772741 (SEQ ID NO:208), gi|1617206 (SEQ ID NO:318), Clone 1808894 (SEQ ID NO:320), and gi|1617197 (SEQ ID NO:321). Other homologs and/or orthologs include Ceres CLONE ID no. 1115650 (SEQ ID NO:205), Ceres CLONE ID no. 1760834 (SEQ ID NO:209), Ceres CLONE ID no. 1762311 (SEQ ID NO:210), Ceres CLONE ID no. 1080241 (SEQ ID NO:211), Ceres CLONE ID no. 960043 (SEQ ID NO:212), Ceres CLONE ID no. 1782555 (SEQ ID NO:213), and Ceres CLONE ID no. 1036232 (SEQ ID NO:214).

[0130] In some cases, an oil-modulating polypeptide includes a polypeptide having at least 80% sequence identity, e.g., 80%, 85%, 90%, 95%, 97%, 98%, or 99% sequence identity, to an amino acid sequence corresponding to SEQ ID NO:204, SEQ ID NO:205, SEQ ID NO:206, SEQ ID NO:207, SEQ ID NO:208, SEQ ID NO:209, SEQ ID NO:210, SEQ ID NO:211, SEQ ID NO:212, SEQ ID NO:213, SEQ ID NO:214, SEQ ID NO:318, SEQ ID NO:320, or SEQ ID NO:321.

[0131] SEQ ID NO:80, SEQ ID NO:151, SEQ ID NO:367, and SEQ ID NO:175 set forth the amino acid sequences of DNA clones, identified herein as Ceres CLONE ID no. 590462 (SEQ ID NO:79), Ceres CDNA ID no. 12703936 (SEQ ID NO:150), Ceres SEED LINE ME11833 (SEQ ID NO:366), and Ceres ANNOT ID no. 542494 (SEQ ID NO:361), respectively, each of which is predicted to encode a polypeptide that does not have homology to an existing protein family based on Pfam analysis. An oil-modulating polypeptide can comprise the amino acid sequence set forth in SEQ ID NO:80, SEQ ID NO:151, SEQ ID NO:367, or SEQ ID NO:175. Alternatively, an oil-modulating polypeptide can be a homolog, ortholog, or variant of the polypeptide having the amino acid sequence set forth in SEQ ID NO:80, SEQ ID NO:151, SEQ ID NO:367, or SEQ ID NO:175. For example, an oil-modulating polypeptide can have an amino acid sequence with at least 40% sequence identity, e.g., 41%, 45%, 50%, 55%, 60%, 65%, 70%, 75%, 80%, 85%, 90%, 95%, 97%, 98%, or 99% sequence identity, to the amino acid sequence set forth in SEQ ID NO:80, SEQ ID NO:151, SEQ ID NO:367, or SEQ ID NO:175.

[0132] For example, the alignment in FIG. 14 provides the amino acid sequences of Clone 590462 (SEQ ID NO:80), gi|114974_T (SEQ ID NO:415), gi|92881003_T (SEQ ID NO:416), gi|54290938_T (SEQ ID NO:417), gi|16757966_T (SEQ ID NO:418), gi|54401705_T (SEQ ID NO:420), Annot 1437978_T (SEQ ID NO:421), gi|6118076_T (SEQ ID NO:422), gi|32400332_T (SEQ ID NO:423), gi|110623260_T (SEQ ID NO:424), Clone 1777157_T (SEQ ID NO:425), Clone 732610_T (SEQ ID NO:426), Clone 1926430_T (SEQ ID NO:427), gi|6840855_T (SEQ ID NO:428), Clone 327253_T (SEQ ID NO:429), gi|249262_T (SEQ ID NO:430), gi|28628597_T (SEQ ID NO:431), gi|127734_T (SEQ ID NO:433), gi|17226270_T (SEQ ID NO:434), gi|127733_T (SEQ ID NO:437), gi|71361195_T (SEQ ID NO:439), gi|56112345_T (SEQ ID NO:440), and gi|11034734_T (SEQ ID NO:441). Other homologs and/or orthologs include Ceres ANNOT ID no. 1490788_T (SEQ ID NO:419), Public GI ID no. 11034736_T (SEQ ID NO:432), Public GI ID no. 62131643_T (SEQ ID NO:435), Public GI ID no. 56130951_T (SEQ ID NO:436), and Public GI ID no. 12621052_T (SEQ ID NO:438).

[0133] For example, the alignment in FIG. 4 provides the amino acid sequences of Annot 569483 (SEQ ID NO:151), Annot 1488415 (SEQ ID NO:153), Clone 524650 (SEQ ID NO:156), Clone 237720 (SEQ ID NO:157), Clone 703914 (SEQ ID NO:159), and gi|150881429 (SEQ ID NO:160). Other homologs and/or orthologs include Ceres ANNOT ID no. 1460393 (SEQ ID NO:155), Ceres CLONE ID no. 465517 (SEQ ID NO:158), Ceres CLONE ID no. 1817099 (SEQ ID NO:348), Ceres CLONE ID no. 1808214 (SEQ ID NO:350), Ceres CLONE ID no. 1870041 (SEQ ID NO:352), and Public GI ID no. 108862961 (SEQ ID NO:353).

[0134] For example, the alignment in FIG. 6 provides the amino acid sequences of Annot 542494 (SEQ ID NO:175), Clone 1369396 (SEQ ID NO:176), Clone 1102549 (SEQ ID NO:177), Annot 1515577 (SEQ ID NO:179), Clone 516401 (SEQ ID NO:180), Clone 618542 (SEQ ID NO:181), and gi|50940451 (SEQ ID NO:182). Other homologs and/or orthologs include Ceres CLONE ID no. 305154 (SEQ ID NO:183) and Ceres CLONE ID no. 1779106 (SEQ ID NO:309).

[0135] In some cases, an oil-modulating polypeptide includes a polypeptide having at least 80% sequence identity, e.g., 80%, 85%, 90%, 95%, 97%, 98%, or 99% sequence identity, to an amino acid sequence corresponding to any of SEQ ID NO:153, SEQ ID NO:155, SEQ ID NO:156, SEQ ID NO:157, SEQ ID NO:158, SEQ ID NO:159, SEQ ID NO:160, SEQ ID NO:176, SEQ ID NO:177, SEQ ID NO:179, SEQ ID NO:180, SEQ ID NO:181, SEQ ID NO:182, SEQ ID NO:183, SEQ ID NO:309, SEQ ID NO:348, SEQ ID NO:350, SEQ ID NO:352, SEQ ID NO:353, or SEQ ID NOs:415-441.

[0136] An oil-modulating polypeptide encoded by a recombinant nucleic acid can be a native oil-modulating polypeptide, i.e., one or more additional copies of the coding sequence for an oil-modulating polypeptide that is naturally present in the cell. Alternatively, an oil-modulating polypeptide can be heterologous to the cell, e.g., a transgenic Lycopersicon plant can contain the coding sequence for a transcription factor polypeptide from a Glycine plant.

[0137] An oil-modulating polypeptide can include additional amino acids that are not involved in oil modulation, and thus can be longer than would otherwise be the case. For example, an oil-modulating polypeptide can include an amino acid sequence that functions as a reporter. Such an oil-modulating polypeptide can be a fusion protein in which a green fluorescent protein (GFP) polypeptide is fused to, e.g., SEQ ID NO: 87, or in which a yellow fluorescent protein (YFP) polypeptide is fused to, e.g., SEQ ID NO:175. In some embodiments, an oil-modulating polypeptide includes a purification tag, a chloroplast transit peptide, a mitochondrial transit peptide, or a leader sequence added to the amino or carboxy terminus.

[0138] Oil-modulating polypeptide candidates suitable for use in the invention can be identified by analysis of nucleotide and polypeptide sequence alignments. For example, performing a query on a database of nucleotide or polypeptide sequences can identify homologs and/or orthologs of oil-modulating polypeptides. Sequence analysis can involve BLAST, Reciprocal BLAST, or PSI-BLAST analysis of nonredundant databases using known oil-modulating polypeptide amino acid sequences. Those polypeptides in the database that have greater than 40% sequence identity can be identified as candidates for further evaluation for suitability as an oil-modulating polypeptide. Amino acid sequence similarity allows for conservative amino acid substitutions, such as substitution of one hydrophobic residue for another or substitution of one polar residue for another. If desired, manual inspection of such candidates can be carried out in order to narrow the number of candidates to be further evaluated. Manual inspection can be performed by selecting those candidates that appear to have domains suspected of being present in oil-modulating polypeptides, e.g., conserved functional domains.

[0139] The identification of conserved regions in a template or subject polypeptide can facilitate production of variants of wild type oil-modulating polypeptides. Conserved regions can be identified by locating a region within the primary amino acid sequence of a template polypeptide that is a repeated sequence, forms some secondary structure (e.g., helices and beta sheets), establishes positively or negatively charged domains, or represents a protein motif or domain. See, e.g., the Pfam web site describing consensus sequences for a variety of protein motifs and domains at sanger.ac.uk/Pfam and genome.wustl.edu/Pfam. A description of the information included at the Pfam database is described in Sonnhammer et al., Nucl. Acids Res., 26:320-322 (1998); Sonnhammer et al., Proteins, 28:405-420 (1997); and Bateman et al., Nucl. Acids Res., 27:260-262 (1999). Amino acid residues corresponding to Pfam domains included in oil-modulating polypeptides provided herein are set forth in the sequence listing. For example, amino acid residues 141 to 205 of the amino acid sequence set forth in SEQ ID NO:82 correspond to an AP2 domain, as indicated in fields <222> and <223> for SEQ ID NO:82 in the sequence listing.

[0140] Conserved regions also can be determined by aligning sequences of the same or related polypeptides from closely related species. Closely related species preferably are from the same family. In some embodiments, alignment of sequences from two different species is adequate. For example, sequences from Arabidopsis and Zea mays can be used to identify one or more conserved regions.

[0141] Typically, polypeptides that exhibit at least about 40% amino acid sequence identity are useful to identify conserved regions. Conserved regions of related polypeptides can exhibit at least 45% amino acid sequence identity (e.g., at least 50%, at least 60%, at least 70%, at least 80%, or at least 90% amino acid sequence identity). In some embodiments, a conserved region of target and template polypeptides exhibit at least 92%, 94%, 96%, 98%, or 99% amino acid sequence identity. Amino acid sequence identity can be deduced from amino acid or nucleotide sequences. In certain cases, highly conserved domains have been identified within oil-modulating polypeptides. These conserved regions can be useful in identifying functionally similar (orthologous) oil-modulating polypeptides.

[0142] In some instances, suitable oil-modulating polypeptides can be synthesized on the basis of consensus functional domains and/or conserved regions in polypeptides that are homologous oil-modulating polypeptides. Domains are groups of substantially contiguous amino acids in a polypeptide that can be used to characterize protein families and/or parts of proteins. Such domains have a “fingerprint” or “signature” that can comprise conserved (1) primary sequence, (2) secondary structure, and/or (3) three-dimensional conformation. Generally, domains are correlated with specific in vitro and/or in vivo activities. A domain can have a length of from 10 amino acids to 400 amino acids, e.g., 10 to 50 amino acids, or 25 to 100 amino acids, or 35 to 65 amino acids, or 35 to 55 amino acids, or 45 to 60 amino acids, or 200 to 300 amino acids, or 300 to 400 amino acids.

[0143] Representative homologs and/or orthologs of oil-modulating polypeptides are shown in FIGS. 1-14. Each Figure represents an alignment of the amino acid sequence of an oil-modulating polypeptide with the amino acid sequences of corresponding homologs and/or orthologs. Amino acid sequences of oil-modulating polypeptides and their corresponding homologs and/or orthologs have been aligned to identify conserved amino acids, as shown in FIGS. 1-14. A dash in an aligned sequence represents a gap, i.e., a lack of an amino acid at that position. Identical amino acids or conserved amino acid substitutions among aligned sequences are identified by boxes. Each conserved region contains a sequence of contiguous amino acid residues.

[0144] Useful polypeptides can be constructed based on the conserved regions in FIG. 1, FIG. 2, FIG. 3, FIG. 4, FIG. 5, FIG. 6, FIG. 7, FIG. 8, FIG. 9, FIG. 10, FIG. 11, FIG. 12, FIG. 13, or FIG. 14. Such a polypeptide includes the conserved regions, arranged in the order depicted in the Figure from amino-terminal end to carboxy-terminal end. Such a polypeptide may also include zero, one, or more than one amino acid in positions marked by dashes. When no amino acids are present at positions marked by dashes, the length of such a polypeptide is the sum of the amino acid residues in all conserved regions. When amino acids are present at all positions marked by dashes, such a polypeptide has a length that is the sum of the amino acid residues in all conserved regions and all dashes.

[0145] Conserved regions can be identified by homologous polypeptide sequence analysis as described above. The suitability of polypeptides for use as oil-modulating polypeptides can be evaluated by functional complementation studies.

[0146] Useful polypeptides can also be identified based on the polypeptides set forth in any of FIGS. 1-14 using algorithms designated as Hidden Markov Models. A “Hidden Markov Model (HMM)” is a statistical model of a consensus sequence for a group of homologous and/or orthologous polypeptides. See, Durbin et al., Biological Sequence Analysis Probabilistic Models of Proteins and Nucleic Acids, Cambridge University Press, Cambridge, UK.(1998). An HMM is generated by the program HMMER 2.3.2 using the multiple sequence alignment of the group of homologous and/or orthologous sequences as input and the default program parameters. The multiple sequence alignment is generated by ProbCons (Do et al., Genome Res., 15(2):330-40 (2005)) version 1.11 using a set of default parameters: -c, --consistency REPS of 2; -ir, --iterative-refinement REPS of 100; -pre, --pre-training REPS of 0. ProbCons is a public domain software program provided by Stanford University.

[0147] The default parameters for building an HMM (hmmbuild) are as follows: the default “architecture prior” (archpri) used by MAP architecture construction is 0.85, and the default cutoff threshold (idlevel) used to determine the effective sequence number is 0.62. The HMMER 2.3.2 package was released Oct. 3, 2003 under a GNU general public license, and is available from various sources on the World Wide Web such as hmmer.janelia.org, hmmer.wustl.edu, and fr.com/hmmer232/. Hmmbuild outputs the model as a text file.

[0148] The HMM for a group of homologous and/or orthologous polypeptides can be used to determine the likelihood that a subject polypeptide sequence is a better fit to that particular HMM than to a null HMM generated using a group of sequences that are not homologous and/or orthologous. The likelihood that a subject polypeptide sequence is a better fit to an HMM than to a null HMM is indicated by the HMM bit score, a number generated when the subject sequence is fitted to the HMM profile using the HMMER hmmsearch program. The following default parameters are used when running hmmsearch: the default E-value cutoff (E) is 10.0, the default bit score cutoff (T) is negative infinity, the default number of sequences in a database (Z) is the real number of sequences in the database, the default E-value cutoff for the per-domain ranked hit list (domE) is infinity, and the default bit score cutoff for the per-domain ranked hit list (domT) is negative infinity. A high HMM bit score indicates a greater likelihood that the subject sequence carries out one or more of the biochemical or physiological function(s) of the polypeptides used to generate the HMM. A high HMM bit score is at least 20, and often is higher.

[0149] An oil-modulating polypeptide can fit an HMM provided herein with an HMM bit score greater than 20 (e.g., greater than 30, 40, 50, 60, 70, 80, 90, 100, 200, 300, 400, or 500). In some cases, an oil-modulating polypeptide can fit an HMM provided herein with an HMM bit score that is about 50%, 60%, 70%, 80%, 90%, or 95% of the HMM bit score of any homologous and/or orthologous polypeptide provided in any of Tables 27-40. In some cases, an oil-modulating polypeptide can fit an HMM described herein with an HMM bit score greater than 20, and can have a conserved domain, e.g., a PFAM domain, or a conserved region having 70% or greater sequence identity (e.g., 75%, 80%, 85%, 90%, 95%, or 100% sequence identity) to a conserved domain or region present in an oil-modulating polypeptide disclosed herein.

[0150] For example, an oil-modulating polypeptide can fit an HMM generated using the amino acid sequences set forth in FIG. 1 with an HMM bit score that is greater than about 200 (e.g., greater than about 250, 300, 350, 400, 450, 500, 550, 600, 650, or 700). In some cases, an oil-modulating polypeptide can fit an HMM generated using the amino acid sequences set forth in FIG. 2 with an HMM bit score that is greater than about 250 (e.g., greater than about 300, 350, 400, 450, 500, 550, 600, 650, 700, 750, or 800). In some cases, an oil modulating polypeptide can fit an HMM generated using the amino acid sequences set forth in FIG. 3 with an HMM bit score that is greater than about 200 (e.g., greater than about 250, 275, 300, 325, 350, 375, 400, 425, or 450). In some cases, an oil-modulating polypeptide can fit an HMM generated using the amino acid sequences set forth in FIG. 4 with an HMM bit score that is greater than about 150 (e.g., greater than about 175, 200, 225, 250, 275, 300, 325, 350, 375, 400, 425, or 450). In some cases, an oil-modulating polypeptide can fit an HMM generated using the amino acid sequences set forth in FIG. 5 with an HMM bit score that is greater than about 150 (e.g., greater than about 175, 200, 225, 250, 275, 300, 325, 350, 375, or 400). In some cases, an oil-modulating polypeptide can fit an HMM generated using the amino acid sequences set forth in FIG. 6 with an HMM bit score that is greater than about 145 (e.g., greater than about 150, 175, 200, 225, 250, 275, 300, 325, or 350). In some cases, an oil-modulating polypeptide can fit an HMM generated using the amino acid sequences set forth in FIG. 7 with an HMM bit score that is greater than about 350 (e.g., greater than about 400, 450, 500, 550, 600, 650, 700, or 750). In some cases, an oil-modulating polypeptide can fit an HMM generated using the amino acid sequences set forth in FIG. 8 with an HMM bit score that is greater than about 300 (e.g., greater than about 350, 400, 450, 500, 550, 600, or 650). In some cases, an oil-modulating polypeptide can fit an HMM generated using the amino acid sequences set forth in FIG. 9 with an HMM bit score that is greater than about 250 (e.g., greater than about 275, 300, 325, 350, 375, 400, 425, 450, 475, 500, 525, 550, 575, or 600). In some cases, an oil-modulating polypeptide can fit an HMM generated using the amino acid sequences set forth in FIG. 10 with an HMM bit score that is greater than about 50 (e.g., greater than about 75, 80, 90, 100, 125, 150, 175, 200, 225, 250, 275, or 300). In some cases, an oil-modulating polypeptide can fit an HMM generated using the amino acid sequences set forth in FIG. 11 with an HMM bit score that is greater than about 50 (e.g., greater than about 55, 60, 65, 70, 75, 80, 85, 90, 95, 100, 110, 120, 130, 140, 150, 160, or 170). In some cases, an oil-modulating polypeptide can fit an HMM generated using the amino acid sequences set forth in FIG. 12 with an HMM bit score that is greater than about 450 (e.g., greater than about 475, 500, 550, 600, 650, 700, 750, 800, 850, 900, 950, 1000, 1050, or 1100). In some cases, an oil-modulating polypeptide can fit an HMM generated using the amino acid sequences set forth in FIG. 13 with an HMM bit score that is greater than about 500 (e.g., greater than about 550, 600, 650, 700, 750, 800, 850, 900, 950, or 1000). In some cases, an oil-modulating polypeptide can fit an HMM generated using the amino acid sequences set forth in FIG. 14 with an HMM bit score that is greater than about 50 (e.g., greater than about 60, 65, 70, 75, 80, 85, 90, 95, 100, 105, 110, 115, 120, 125, 130, 135, 140, or 145).

### Nucleic Acids

[0151] The terms “nucleic acid” and “polynucleotide” are used interchangeably herein, and refer to both RNA and DNA, including cDNA, genomic DNA, synthetic DNA, and DNA (or RNA) containing nucleic acid analogs. Polynucleotides can have any three-dimensional structure. A nucleic acid can be double-stranded or single-stranded (i.e., a sense strand or an antisense strand). Non-limiting examples of polynucleotides include genes, gene fragments, exons, introns, messenger RNA (mRNA), transfer RNA, ribosomal RNA, siRNA, micro-RNA, ribozymes, cDNA, recombinant polynucleotides, branched polynucleotides, plasmids, vectors, isolated DNA of any sequence, isolated RNA of any sequence, nucleic acid probes, and primers, as well as nucleic acid analogs.

[0152] Nucleic acids described herein include oil-modulating nucleic acids. Oil-modulating nucleic acids can be effective to modulate oil levels when transcribed in a plant or plant cell. An oil-modulating nucleic acid can comprise the nucleotide sequence set forth in SEQ ID NO:79. Alternatively, an oil-modulating nucleic acid can be a variant of the nucleic acid having the nucleotide sequence set forth in SEQ ID NO:79. For example, an oil-modulating nucleic acid can have a nucleotide sequence with at least 80% sequence identity, e.g., 81%, 85%, 90%, 95%, 97%, 98%, or 99% sequence identity, to the nucleotide sequence set forth in SEQ ID NO:79.

[0153] An “isolated” nucleic acid can be, for example, a naturally-occurring DNA molecule, provided one of the nucleic acid sequences normally found immediately flanking that DNA molecule in a naturally-occurring genome is removed or absent. Thus, an isolated nucleic acid includes, without limitation, a DNA molecule that exists as a separate molecule, independent of other sequences (e.g., a chemically synthesized nucleic acid, or a cDNA or genomic DNA fragment produced by the polymerase chain reaction (PCR) or restriction endonuclease treatment). An isolated nucleic acid also refers to a DNA molecule that is incorporated into a vector, an autonomously replicating plasmid, a virus, or into the genomic DNA of a prokaryote or eukaryote. In addition, an isolated nucleic acid can include an engineered nucleic acid such as a DNA molecule that is part of a hybrid or fusion nucleic acid. A nucleic acid existing among hundreds to millions of other nucleic acids within, for example, cDNA libraries or genomic libraries, or gel slices containing a genomic DNA restriction digest, is not to be considered an isolated nucleic acid.

[0154] Isolated nucleic acid molecules can be produced by standard techniques. For example, polymerase chain reaction (PCR) techniques can be used to obtain an isolated nucleic acid containing a nucleotide sequence described herein. PCR can be used to amplify specific sequences from DNA as well as RNA, including sequences from total genomic DNA or total cellular RNA. Various PCR methods are described, for example, in PCR Primer: A Laboratory Manual, Dieffenbach and Dveksler, eds., Cold Spring Harbor Laboratory Press, 1995. Generally, sequence information from the ends of the region of interest or beyond is employed to design oligonucleotide primers that are identical or similar in sequence to opposite strands of the template to be amplified. Various PCR strategies also are available by which site-specific nucleotide sequence modifications can be introduced into a template nucleic acid. Isolated nucleic acids also can be chemically synthesized, either as a single nucleic acid molecule (e.g., using automated DNA synthesis in the 3′ to 5′ direction using phosphoramidite technology) or as a series of oligonucleotides. For example, one or more pairs of long oligonucleotides (e.g., >100 nucleotides) can be synthesized that contain the desired sequence, with each pair containing a short segment of complementarity (e.g., about 15 nucleotides) such that a duplex is formed when the oligonucleotide pair is annealed. DNA polymerase is used to extend the oligonucleotides, resulting in a single, double-stranded nucleic acid molecule per oligonucleotide pair, which then can be ligated into a vector. Isolated nucleic acids of the invention also can be obtained by mutagenesis of, e.g., a naturally occurring DNA.

[0155] As used herein, the term “percent sequence identity” refers to the degree of identity between any given query sequence and a subject sequence. A subject sequence typically has a length that is more than 80 percent, e.g., more than 82, 85, 87, 89, 90, 93, 95, 97, 99, 100, 105, 110, 115, or 120 percent, of the length of the query sequence. A query nucleic acid or amino acid sequence is aligned to one or more subject nucleic acid or amino acid sequences using the computer program ClustalW (version 1.83, default parameters), which allows alignments of nucleic acid or protein sequences to be carried out across their entire length (global alignment). Chema et al., Nucleic Acids Res., 31(13):3497-500 (2003).

[0156] ClustalW calculates the best match between a query and one or more subject sequences, and aligns them so that identities, similarities and differences can be determined. Gaps of one or more residues can be inserted into a query sequence, a subject sequence, or both, to maximize sequence alignments. For fast pairwise alignment of nucleic acid sequences, the following default parameters are used: word size: 2; window size: 4; scoring method: percentage; number of top diagonals: 4; and gap penalty: 5. For multiple alignment of nucleic acid sequences, the following parameters are used: gap opening penalty: 10.0; gap extension penalty: 5.0; and weight transitions: yes. For fast pairwise alignment of protein sequences, the following parameters are used: word size: 1; window size: 5; scoring method: percentage; number of top diagonals: 5; gap penalty: 3. For multiple alignment of protein sequences, the following parameters are used: weight matrix: blosum; gap opening penalty: 10.0; gap extension penalty: 0.05; hydrophilic gaps: on; hydrophilic residues: Gly, Pro, Ser, Asn, Asp, Gln, Glu, Arg, and Lys; residue-specific gap penalties: on. The output is a sequence alignment that reflects the relationship between sequences. ClustalW can be run, for example, at the Baylor College of Medicine Search Launcher site (searchlauncher.bcm.tmc.edu/multi-align/multi-align.html) and at the European Bioinformatics Institute site on the World Wide Web (ebi.ac.uk/clustalw).

[0157] To determine a percent identity between a query sequence and a subject sequence, ClustalW divides the number of identities in the best alignment by the number of residues compared (gap positions are excluded), and multiplies the result by 100. The output is the percent identity of the subject sequence with respect to the query sequence. It is noted that the percent identity value can be rounded to the nearest tenth. For example, 78.11, 78.12, 78.13, and 78.14 are rounded down to 78.1, while 78.15, 78.16, 78.17, 78.18, and 78.19 are rounded up to 78.2.

[0158] The term “exogenous” with respect to a nucleic acid indicates that the nucleic acid is part of a recombinant nucleic acid construct, or is not in its natural environment. For example, an exogenous nucleic acid can be a sequence from one species introduced into another species, i.e., a heterologous nucleic acid. Typically, such an exogenous nucleic acid is introduced into the other species via a recombinant nucleic acid construct. An exogenous nucleic acid can also be a sequence that is native to an organism and that has been reintroduced into cells of that organism. An exogenous nucleic acid that includes a native sequence can often be distinguished from the naturally occurring sequence by the presence of non-natural sequences linked to the exogenous nucleic acid, e.g., non-native regulatory sequences flanking a native sequence in a recombinant nucleic acid construct. In addition, stably transformed exogenous nucleic acids typically are integrated at positions other than the position where the native sequence is found. It will be appreciated that an exogenous nucleic acid may have been introduced into a progenitor and not into the cell under consideration. For example, a transgenic plant containing an exogenous nucleic acid can be the progeny of a cross between a stably transformed plant and a non-transgenic plant. Such progeny are considered to contain the exogenous nucleic acid.

[0159] Recombinant constructs are also provided herein and can be used to transform plants or plant cells in order to modulate oil levels. A recombinant nucleic acid construct comprises a nucleic acid encoding an oil-modulating polypeptide as described herein, operably linked to a regulatory region suitable for expressing the oil-modulating polypeptide in the plant or cell. Thus, a nucleic acid can comprise a coding sequence that encodes any of the oil-modulating polypeptides as set forth in SEQ ID NO:80, SEQ ID NOs:82-85, SEQ ID NOs:87-127, SEQ ID NOs:129-130, SEQ ID NOs:132-133, SEQ ID NOs:135-138, SEQ ID NOs:140-146, SEQ ID NOs:148-149, SEQ ID NO:151, SEQ ID NO:153, SEQ ID NOs:155-160, SEQ ID NOs:162-164, SEQ ID NO:166, SEQ ID NOs:168-171, SEQ ID NO:173, SEQ ID NOs:175-177, SEQ ID NOs:179-183, SEQ ID NOs:185-188, SEQ ID NOs:190-193, SEQ ID NOs:195-196, SEQ ID NOs:198-199, SEQ ID NO:201, SEQ ID NOs:203-214, SEQ ID NO:216, SEQ ID NO:218, SEQ ID NOs:220-227, SEQ ID NOs:229-230, SEQ ID NOs:232-235, SEQ ID NOs:237-243, SEQ ID NO:245, SEQ ID NOs:247-249, SEQ ID NO:309, SEQ ID NO:311, SEQ ID NO:313, SEQ ID NO:315, SEQ ID NOs:317-318, SEQ ID NOs:320-321, SEQ ID NO:323, SEQ ID NO:325, SEQ ID NO:327, SEQ ID NO:329, SEQ ID NOs:331-332, SEQ ID NOs:334-335, SEQ ID NOs:337-338, SEQ ID NOs:340-341, SEQ ID NOs:343-344, SEQ ID NO:346, SEQ ID NO:348, SEQ ID NO:350, SEQ ID NOs:352-353, SEQ ID NO:355, SEQ ID NO:357, SEQ ID NOs:359-360, SEQ ID NO:367, or SEQ ID NOs:415-441.

[0160] Examples of nucleic acids encoding oil-modulating polypeptides are set forth in SEQ ID NO:79, SEQ ID NO:81, SEQ ID NO:86, SEQ ID NO:128, SEQ ID NO:131, SEQ ID NO:134, SEQ ID NO:139, SEQ ID NO:147, SEQ ID NO:150, SEQ ID NO:152, SEQ ID NO:154, SEQ ID NO:161, SEQ ID NO:165, SEQ ID NO:167, SEQ ID NO:172, SEQ ID NO:174, SEQ ID NO:178, SEQ ID NO:184, SEQ ID NO:189, SEQ ID NO:194, SEQ ID NO:197, SEQ ID NO:200, SEQ ID NO:202, SEQ ID NO:215, SEQ ID NO:217, SEQ ID NO:219, SEQ ID NO:228, SEQ ID NO:231, SEQ ID NO:236, SEQ ID NO:244, SEQ ID NO:246, SEQ ID NOs:265-308, SEQ ID NO:310, SEQ ID NO:312, SEQ ID NO:314, SEQ ID NO:316, SEQ ID NO:319, SEQ ID NO:322, SEQ ID NO:324, SEQ ID NO:326, SEQ ID NO:328, SEQ ID NO:330, SEQ ID NO:333, SEQ ID NO:336, SEQ ID NO:339, SEQ ID NO:342, SEQ ID NO:345, SEQ ID NO:347, SEQ ID NO:349, SEQ ID NO:351, SEQ ID NO:354, SEQ ID NO:356, SEQ ID NO:358, and SEQ ID NOs:361-366.

[0161] In some cases, a recombinant nucleic acid construct can include a nucleic acid comprising less than the full-length coding sequence of an oil-modulating polypeptide. In some cases, a recombinant nucleic acid construct can include a nucleic acid comprising a coding sequence, a gene, or a fragment of a coding sequence or gene in an antisense orientation so that the antisense strand of RNA is transcribed.

[0162] It will be appreciated that a number of nucleic acids can encode a polypeptide having a particular amino acid sequence. The degeneracy of the genetic code is well known to the art; i.e., for many amino acids, there is more than one nucleotide triplet that serves as the codon for the amino acid. For example, codons in the coding sequence for a given oil-modulating polypeptide can be modified such that optimal expression in a particular plant species is obtained, using appropriate codon bias tables for that species.

[0163] Vectors containing nucleic acids such as those described herein also are provided. A “vector” is a replicon, such as a plasmid, phage, or cosmid, into which another DNA segment may be inserted so as to bring about the replication of the inserted segment. Generally, a vector is capable of replication when associated with the proper control elements. Suitable vector backbones include, for example, those routinely used in the art such as plasmids, viruses, artificial chromosomes, BACs, YACs, or PACs. The term “vector” includes cloning and expression vectors, as well as viral vectors and integrating vectors. An “expression vector” is a vector that includes a regulatory region. Suitable expression vectors include, without limitation, plasmids and viral vectors derived from, for example, bacteriophage, baculoviruses, and retroviruses. Numerous vectors and expression systems are commercially available from such corporations as Novagen (Madison, Wis.), Clontech (Palo Alto, Calif.), Stratagene (La Jolla, Calif.), and Invitrogen/Life Technologies (Carlsbad, Calif.).

[0164] The vectors provided herein also can include, for example, origins of replication, scaffold attachment regions (SARs), and/or markers. A marker gene can confer a selectable phenotype on a plant cell. For example, a marker can confer biocide resistance, such as resistance to an antibiotic (e.g., kanamycin, G418, bleomycin, or hygromycin), or an herbicide (e.g., chlorosulfuron or phosphinothricin). In addition, an expression vector can include a tag sequence designed to facilitate manipulation or detection (e.g., purification or localization) of the expressed polypeptide. Tag sequences, such as green fluorescent protein (GFP), glutathione S-transferase (GST), polyhistidine, c-myc, hemagglutinin, or Flag™ tag (Kodak, New Haven, Conn.) sequences typically are expressed as a fusion with the encoded polypeptide. Such tags can be inserted anywhere within the polypeptide, including at either the carboxyl or amino terminus.

### Regulatory Regions

[0165] The term “regulatory region” refers to nucleotide sequences that influence transcription or translation initiation and rate, and stability and/or mobility of a transcription or translation product. Regulatory regions include, without limitation, promoter sequences, enhancer sequences, response elements, protein recognition sites, inducible elements, protein binding sequences, 5′ and 3′ untranslated regions (UTRs), transcriptional start sites, termination sequences, polyadenylation sequences, and introns.

[0166] As used herein, the term “operably linked” refers to positioning of a regulatory region and a sequence to be transcribed in a nucleic acid so as to influence transcription or translation of such a sequence. For example, to bring a coding sequence under the control of a promoter, the translation initiation site of the translational reading frame of the polypeptide is typically positioned between one and about fifty nucleotides downstream of the promoter. A promoter can, however, be positioned as much as about 5,000 nucleotides upstream of the translation initiation site, or about 2,000 nucleotides upstream of the transcription start site. A promoter typically comprises at least a core (basal) promoter. A promoter also may include at least one control element, such as an enhancer sequence, an upstream element or an upstream activation region (UAR). For example, a suitable enhancer is a cis-regulatory element (−212 to −154) from the upstream region of the octopine synthase (ocs) gene. Fromm et al., The Plant Cell, 1:977-984 (1989). The choice of promoters to be included depends upon several factors, including, but not limited to, efficiency, selectability, inducibility, desired expression level, and cell- or tissue-preferential expression. It is a routine matter for one of skill in the art to modulate the expression of a coding sequence by appropriately selecting and positioning promoters and other regulatory regions relative to the coding sequence.

[0167] Some suitable promoters initiate transcription only, or predominantly, in certain cell types. For example, a promoter that is active predominantly in a reproductive tissue (e.g., fruit, ovule, pollen, pistils, female gametophyte, egg cell, central cell, nucellus, suspensor, synergid cell, flowers, embryonic tissue, embryo sac, embryo, zygote, endospern, integument, or seed coat) can be used. Thus, as used herein a cell type- or tissue-preferential promoter is one that drives expression preferentially in the target tissue, but may also lead to some expression in other cell types or tissues as well. Methods for identifying and characterizing promoter regions in plant genomic DNA include, for example, those described in the following references: Jordano et al., Plant Cell, 1:855-866 (1989); Bustos et al., Plant Cell, 1:839-854 (1989); Green et al., EMBO J., 7:4035-4044 (1988); Meier et al., Plant Cell, 3:309-316 (1991); and Zhang et al., Plant Physiology, 110:1069-1079 (1996).

[0168] Examples of various classes of promoters are described below. Some of the promoters indicated below as well as additional promoters are described in more detail in U.S. patent application Ser. Nos. 60/505,689; 60/518,075; 60/544,771; 60/558,869; 60/583,691; 60/619,181; 60/637,140; 60/757,544; 60/776,307; 10/957,569; 11/058,689; 11/172,703; 11/208,308; 11/274,890; 60/583,609; 60/612,891; 11/097,589; 11/233,726; 10/950,321; PCT/US05/011105; PCT/US05/034308; and PCT/US05/23639. Nucleotide sequences of promoters are set forth in SEQ ID NOs:1-78 and SEQ ID NOs:250-264. It will be appreciated that a promoter may meet criteria for one classification based on its activity in one plant species, and yet meet criteria for a different classification based on its activity in another plant species.

[0169] Broadly Expressing Promoters

[0170] A promoter can be said to be “broadly expressing” when it promotes transcription in many, but not necessarily all, plant tissues. For example, a broadly expressing promoter can promote transcription of an operably linked sequence in one or more of the shoot, shoot tip (apex), and leaves, but weakly or not at all in tissues such as roots or stems. As another example, a broadly expressing promoter can promote transcription of an operably linked sequence in one or more of the stem, shoot, shoot tip (apex), and leaves, but can promote transcription weakly or not at all in tissues such as reproductive tissues of flowers and developing seeds. Non-limiting examples of broadly expressing promoters that can be included in the nucleic acid constructs provided herein include the p326 (SEQ ID NO:76), YP0144 (SEQ ID NO:55), YP0190 (SEQ ID NO:59), p13879 (SEQ ID NO:75), YP0050 (SEQ ID NO:35), p32449 (SEQ ID NO:77), 21876 (SEQ ID NO:1), YP0158 (SEQ ID NO:57), YP0214 (SEQ ID NO:61), YP0380 (SEQ ID NO:70), PT0848 (SEQ ID NO:26), and PT0633 (SEQ ID NO:7) promoters. Additional examples include the cauliflower mosaic virus (CaMV) 35S promoter, the mannopine synthase (MAS) promoter, the 1′ or 2′ promoters derived from T-DNA of Agrobacterium tumefaciens, the figwort mosaic virus 34S promoter, actin promoters such as the rice actin promoter, and ubiquitin promoters such as the maize ubiquitin-1 promoter. In some cases, the CaMV 35S promoter is excluded from the category of broadly expressing promoters.

[0171] Root Promoters

[0172] Root-active promoters confer transcription in root tissue, e.g., root endodermis, root epidermis, or root vascular tissues. In some embodiments, root-active promoters are root-preferential promoters, i.e., confer transcription only or predominantly in root tissue. Root-preferential promoters include the YP0128 (SEQ ID NO:52), YP0275 (SEQ ID NO:63), PT0625 (SEQ ID NO:6), PT0660 (SEQ ID NO:9), PT0683 (SEQ ID NO:14), and PT0758 (SEQ ID NO:22) promoters. Other root-preferential promoters include the PT0613 (SEQ ID NO:5), PT0672 (SEQ ID NO:11), PT0688 (SEQ ID NO:15), and PT0837 (SEQ ID NO:24) promoters, which drive transcription primarily in root tissue and to a lesser extent in ovules and/or seeds. Other examples of root-preferential promoters include the root-specific subdomains of the CaMV 35S promoter (Lam et al., Proc. Natl. Acad. Sci. USA, 86:7890-7894 (1989)), root cell specific promoters reported by Conkling et al., Plant Physiol., 93:1203-1211 (1990), and the tobacco RD2 promoter.

[0173] Maturing Endosperm Promoters

[0174] In some embodiments, promoters that drive transcription in maturing endosperm can be useful. Transcription from a maturing endosperm promoter typically begins after fertilization and occurs primarily in endosperm tissue during seed development and is typically highest during the cellularization phase. Most suitable are promoters that are active predominantly in maturing endosperm, although promoters that are also active in other tissues can sometimes be used. Non-limiting examples of maturing endosperm promoters that can be included in the nucleic acid constructs provided herein include the napin promoter, the Arcelin-5 promoter, the phaseolin promoter (Bustos et al., Plant Cell, 1(9):839-853 (1989)), the soybean trypsin inhibitor promoter (Riggs et al., Plant Cell, 1(6):609-621 (1989)), the ACP promoter (Baerson et al., Plant Mol. Biol., 22(2):255-267 (1993)), the stearoyl-ACP desaturase promoter (Slocombe et al., Plant Physiol., 104(4):167-176 (1994)), the soybean α′ subunit of β-conglycinin promoter (Chen et al., Proc. Natl. Acad. Sci. USA, 83:8560-8564 (1986)), the oleosin promoter (Hong et al., Plant Mol. Biol., 34(3):549-555 (1997)), and zein promoters, such as the 15 kD zein promoter, the 16 kD zein promoter, 19 kD zein promoter, 22 kD zein promoter and 27 kD zein promoter. Also suitable are the Osgt-1 promoter from the rice glutelin-1 gene (Zheng et al., Mol. Cell. Biol., 13:5829-5842 (1993)), the beta-amylase promoter, and the barley hordein promoter. Other maturing endosperm promoters include the YP0092 (SEQ ID NO:38), PT0676 (SEQ ID NO:12), and PT0708 (SEQ ID NO:17) promoters.

[0175] Ovary Tissue Promoters

[0176] Promoters that are active in ovary tissues such as the ovule wall and mesocarp can also be useful, e.g., a polygalacturonidase promoter, the banana TRX promoter, and the melon actin promoter. Examples of promoters that are active primarily in ovules include YP0007 (SEQ ID NO:30), YP0111(SEQ ID NO:46), YP0092 (SEQ ID NO:38), YP0103 (SEQ ID NO:43), YP0028 (SEQ ID NO:33), YP6121 (SEQ ID NO:51), YP0008 (SEQ ID NO:31), YP0039 (SEQ ID NO:34), YP0115 (SEQ ID NO:47), YP0119 (SEQ ID NO:49), YP0120 (SEQ ID NO:50), and YP0374 (SEQ ID NO:68).

[0177] Embryo Sac/Early Endosperm Promoters

[0178] To achieve expression in embryo sac/early endosperm, regulatory regions can be used that are active in polar nuclei and/or the central cell, or in precursors to polar nuclei, but not in egg cells or precursors to egg cells. Most suitable are promoters that drive expression only or predominantly in polar nuclei or precursors thereto and/or the central cell. A pattern of transcription that extends from polar nuclei into early endosperm development can also be found with embryo sac/early endosperm-preferential promoters, although transcription typically decreases significantly in later endosperm development during and after the cellularization phase. Expression in the zygote or developing embryo typically is not present with embryo sac/early endosperm promoters.

[0179] Promoters that may be suitable include those derived from the following genes: Arabidopsis viviparous-1 (see, GenBank No. U93215); Arabidopsis atmycl (see, Urao (1996) Plant Mol. Biol., 32:571-57; Conceicao (1994) Plant, 5:493-505); Arabidopsis FIE (GenBank No. AF129516); Arabidopsis MEA; Arabidopsis FIS2 (GenBank No. AF096096); and FIE 1.1 (U.S. Pat. No. 6,906,244). Other promoters that may be suitable include those derived from the following genes: maize MAC1 (see, Sheridan (1996) Genetics, 142:1009-1020); maize Cat3 (see, GenBank No. L05934; Abler (1993) Plant Mol. Biol., 22:10131-1038). Other promoters include the following Arabidopsis promoters: YP0039 (SEQ ID NO:34), YP0101 (SEQ ID NO:41), YP0102 (SEQ ID NO:42), YP0110 (SEQ ID NO:45), YP0117 (SEQ ID NO:48), YP0119 (SEQ ID NO:49), YP0137 (SEQ ID NO:53), DME, YP0285 (SEQ ID NO:64), and YP0212 (SEQ ID NO:60). Other promoters that may be useful include the following rice promoters: p530c10 (SEQ ID NO:250), pOsFIE2-2 (SEQ ID NO:251), pOsMEA (SEQ ID NO:252), pOsYp102 (SEQ ID NO:253), and pOsYp285 (SEQ ID NO:254).

[0180] Embryo Promoters

[0181] Regulatory regions that preferentially drive transcription in zygotic cells following fertilization can provide embryo-preferential expression. Most suitable are promoters that preferentially drive transcription in early stage embryos prior to the heart stage, but expression in late stage and maturing embryos is also suitable. Embryo-preferential promoters include the barley lipid transfer protein (Ltp1) promoter (Plant Cell Rep (2001) 20:647-654), YP0097 (SEQ ID NO:40), YP0107 (SEQ ID NO:44), YP0088 (SEQ ID NO:37), YP0143 (SEQ ID NO:54), YP0156 (SEQ ID NO:56), PT0650 (SEQ ID NO:8), PT0695 (SEQ ID NO:16), PT0723 (SEQ ID NO:19), PT0838 (SEQ ID NO:25), PT0879 (SEQ ID NO:28), and PT0740 (SEQ ID NO:20).

[0182] Photosynthetic Tissue Promoters

[0183] Promoters active in photosynthetic tissue confer transcription in green tissues such as leaves and stems. Most suitable are promoters that drive expression only or predominantly in such tissues. Examples of such promoters include the ribulose-1,5-bisphosphate carboxylase (RbcS) promoters such as the RbcS promoter from eastern larch (Larix laricina), the pine cab6 promoter (Yamamoto et al., Plant Cell Physiol., 35:773-778 (1994)), the Cab-1 promoter from wheat (Fejes et al., Plant Mol. Biol., 15:921-932 (1990)), the CAB-1 promoter from spinach (Lubberstedt et al., Plant Physiol., 104:997-1006 (1994)), the cab1R promoter from rice (Luan et al., Plant Cell, 4:971-981 (1992)), the pyruvate orthophosphate dikinase (PPDK) promoter from corn (Matsuoka et al., Proc. Natl. Acad. Sci. USA, 90:9586-9596 (1993)), the tobacco Lhcb1*2 promoter (Cerdan et al., Plant Mol. Biol., 33:245-255 (1997)), the Arabidopsis thaliana SUC2 sucrose-H+ symporter promoter (Truemit et al., Planta, 196:564-570 (1995)), and thylakoid membrane protein promoters from spinach (psaD, psaF, psaE, PC, FNR, atpC, atpD, cab, rbcS). Other photosynthetic tissue promoters include PT0535 (SEQ ID NO:3), PT0668 (SEQ ID NO:2), PT0886 (SEQ ID NO:29), YP0144 (SEQ ID NO:55), YP0380 (SEQ ID NO:70), and PT0585 (SEQ ID NO:4).

[0184] Vascular Tissue Promoters

[0185] Examples of promoters that have high or preferential activity in vascular bundles include YP0087 (SEQ ID NO:257), YP0093 (SEQ ID NO:258), YP0108 (SEQ ID NO:259), YP0022 (SEQ ID NO:260), and YP0080 (SEQ ID NO:261). Other vascular tissue-preferential promoters include the glycine-rich cell wall protein GRP 1.8 promoter (Keller and Baumgartner, Plant Cell, 3(10):1051-1061 (1991)), the Commelina yellow mottle virus (CoYMV) promoter (Medberry et al., Plant Cell, 4(2):185-192 (1992)), and the rice tungro bacilliform virus (RTBV) promoter (Dai et al., Proc. Natl. Acad. Sci. USA, 101(2):687-692 (2004)).

[0186] Inducible Promoters

[0187] Inducible promoters confer transcription in response to external stimuli such as chemical agents or environmental stimuli. For example, inducible promoters can confer transcription in response to hormones such as giberellic acid or ethylene, or in response to light or drought. Examples of drought-inducible promoters include YP0380 (SEQ ID NO:70), PT0848 (SEQ ID NO:26), YP0381 (SEQ ID NO:71), YP0337 (SEQ ID NO:66), PT0633 (SEQ ID NO:7), YP0374 (SEQ ID NO:68), PT0710 (SEQ ID NO:18), YP0356 (SEQ ID NO:67), YP0385 (SEQ ID NO:73), YP0396 (SEQ ID NO:74), YP0388 (SEQ ID NO:262), YP0384 (SEQ ID NO:72), PT0688 (SEQ ID NO:15), YP0286 (SEQ ID NO:65), YP0377 (SEQ ID NO:69), PD1367 (SEQ ID NO:78), PD0901 (SEQ ID NO:263), and PD0898. Nitrogen-inducible promoters include PT0863 (SEQ ID NO:27), PT0829 (SEQ ID NO:23), PT0665 (SEQ ID NO:10), and PT0886 (SEQ ID NO:29).

[0188] Basal Promoters

[0189] A basal promoter is the minimal sequence necessary for assembly of a transcription complex required for transcription initiation. Basal promoters frequently include a “TATA box” element that may be located between about 15 and about 35 nucleotides upstream from the site of transcription initiation. Basal promoters also may include a “CCAAT box” element (typically the sequence CCAAT) and/or a GGGCG sequence, which can be located between about 40 and about 200 nucleotides, typically about 60 to about 120 nucleotides, upstream from the transcription start site.

[0190] Other Promoters

[0191] Other classes of promoters include, but are not limited to, leaf-preferential, stem/shoot-preferential, callus-preferential, guard cell-preferential, such as PT0678 (SEQ ID NO:13), and senescence-preferential promoters. Promoters designated YP0086 (SEQ ID NO:36), YP0188 (SEQ ID NO:58), YP0263 (SEQ ID NO:62), PT0758 (SEQ ID NO:22), PT0743 (SEQ ID NO:21), PT0829 (SEQ ID NO:23), YP0119 (SEQ ID NO:49), and YP0096 (SEQ ID NO:39), as described in the above-referenced patent applications, may also be useful.

[0192] Other Regulatory Regions

[0193] A 5′ untranslated region (UTR) can be included in nucleic acid constructs described herein. A 5′ UTR is transcribed, but is not translated, and lies between the start site of the transcript and the translation initiation codon and may include the +1 nucleotide. A 3′ UTR can be positioned between the translation termination codon and the end of the transcript. UTRs can have particular functions such as increasing mRNA stability or attenuating translation. Examples of 3′ UTRs include, but are not limited to, polyadenylation signals and transcription termination sequences, e.g., a nopaline synthase termination sequence.

[0194] It will be understood that more than one regulatory region may be present in a recombinant polynucleotide, e.g., introns, enhancers, upstream activation regions, transcription terminators, and inducible elements. Thus, more than one regulatory region can be operably linked to the sequence of a polynucleotide encoding an oil-modulating polypeptide.

[0195] Regulatory regions, such as promoters for endogenous genes, can be obtained by chemical synthesis or by subcloning from a genomic DNA that includes such a regulatory region. A nucleic acid comprising such a regulatory region can also include flanking sequences that contain restriction enzyme sites that facilitate subsequent manipulation.

[0196] Transgenic Plants and Plant Cells

[0197] The invention also features transgenic plant cells and plants comprising at least one recombinant nucleic acid construct described herein. A plant or plant cell can be transformed by having a construct integrated into its genome, i.e., can be stably transformed. Stably transformed cells typically retain the introduced nucleic acid with each cell division. A plant or plant cell can also be transiently transformed such that the construct is not integrated into its genome. Transiently transformed cells typically lose all or some portion of the introduced nucleic acid construct with each cell division such that the introduced nucleic acid cannot be detected in daughter cells after a sufficient number of cell divisions. Both transiently transformed and stably transformed transgenic plants and plant cells can be useful in the methods described herein.

[0198] Transgenic plant cells used in methods described herein can constitute part or all of a whole plant. Such plants can be grown in a manner suitable for the species under consideration, either in a growth chamber, a greenhouse, or in a field. Transgenic plants can be bred as desired for a particular purpose, e.g., to introduce a recombinant nucleic acid into other lines, to transfer a recombinant nucleic acid to other species, or for further selection of other desirable traits. Alternatively, transgenic plants can be propagated vegetatively for those species amenable to such techniques. As used herein, a transgenic plant also refers to progeny of an initial transgenic plant. Progeny includes descendants of a particular plant or plant line. Progeny of an instant plant include seeds formed on F₁, F₂, F₃, F₄, F₅, F₆ and subsequent generation plants, or seeds formed on BC₁, BC₂, BC₃, and subsequent generation plants, or seeds formed on F₁BC₁, F₁BC₂, F₁BC₃, and subsequent generation plants. The designation F₁ refers to the progeny of a cross between two parents that are genetically distinct. The designations F₂, F₃, F₄, F₅ and F₆ refer to subsequent generations of self- or sib-pollinated progeny of an F₁ plant. Seeds produced by a transgenic plant can be grown and then selfed (or outcrossed and selfed) to obtain seeds homozygous for the nucleic acid construct.

[0199] Transgenic plants can be grown in suspension culture, or tissue or organ culture. For the purposes of this invention, solid and/or liquid tissue culture techniques can be used. When using solid medium, transgenic plant cells can be placed directly onto the medium or can be placed onto a filter that is then placed in contact with the medium. When using liquid medium, transgenic plant cells can be placed onto a flotation device, e.g., a porous membrane that contacts the liquid medium. Solid medium typically is made from liquid medium by adding agar. For example, a solid medium can be Murashige and Skoog (MS) medium containing agar and a suitable concentration of an auxin, e.g., 2,4-dichlorophenoxyacetic acid (2,4-D), and a suitable concentration of a cytokinin, e.g., kinetin.

[0200] When transiently transformed plant cells are used, a reporter sequence encoding a reporter polypeptide having a reporter activity can be included in the transformation procedure and an assay for reporter activity or expression can be performed at a suitable time after transformation. A suitable time for conducting the assay typically is about 1-21 days after transformation, e.g., about 1-14 days, about 1-7 days, or about 1-3 days. The use of transient assays is particularly convenient for rapid analysis in different species, or to confirm expression of a heterologous oil-modulating polypeptide whose expression has not previously been confirmed in particular recipient cells.

[0201] Techniques for introducing nucleic acids into monocotyledonous and dicotyledonous plants are known in the art, and include, without limitation, Agrobacterium-mediated transformation, viral vector-mediated transformation, electroporation and particle gun transformation, e.g., U.S. Pat. Nos. 5,538,880; 5,204,253; 6,329,571 and 6,013,863. If a cell or cultured tissue is used as the recipient tissue for transformation, plants can be regenerated from transformed cultures if desired, by techniques known to those skilled in the art.

[0202] Plant Species

[0203] The polynucleotides and vectors described herein can be used to transform a number of monocotyledonous and dicotyledonous plants and plant cell systems, including dicots such as alfalfa, almond, amaranth, apple, apricot, avocado, beans (including kidney beans, lima beans, dry beans, green beans), brazil nut, broccoli, cabbage, canola, carrot, cashew, castor bean, cherry, chick peas, chicory, chocolate, clover, cocoa, coffee, cotton, cottonseed, crambe, eucalyptus, flax, grape, grapefruit, hazelnut, hemp, jatropha, jojoba, lemon, lentils, lettuce, linseed, macadamia nut, mango, melon (e.g., watermelon, cantaloupe), mustard, neem, olive, orange, peach, peanut, peach, pear, peas, pecan, pepper, pistachio, plum, poppy, potato, pumpkin, oilseed rape, quinoa, rapeseed (high erucic acid and canola), safflower, sesame, soybean, spinach, strawberry, sugar beet, sunflower, sweet potatoes, tea, tomato, walnut, and yarns, as well as monocots such as banana, barley, bluegrass, coconut, corn, date palm, fescue, field corn, garlic, millet, oat, oil palm, onion, palm kernel oil, pineapple, popcorn, rice, rye, ryegrass, sorghum, sudangrass, sugarcane, sweet corn, switchgrass, turf grasses, timothy, and wheat. Brown seaweeds, green seaweeds, red seaweeds, and microalgae can also be used.

[0204] Thus, the methods and compositions described herein can be used with dicotyledonous plants belonging, for example, to the orders Apiales, Arecales, Aristochiales, Asterales, Batales, Campanutales, Capparales, Caryophyllales, Casuarinales, Celastrales, Cornales, Cucurbitales, Diapensales, Dilleniales, Dipsacales, Ebenales, Ericales, Eucomiales, Euphorbiales, Fabales, Fagales, Gentianales, Geraniales, Haloragales, Hamamelidales, illiciales, Juglandales, Lamiales, Laurales, Lecythidales, Leitneriales, Linales, Magniolales, Malvales, Myricales, Myrtales, Nymphaeales, Papaverales, Piperales, Plantaginales, Plumbaginales, Podostemales, Polemoniales, Polygalales, Polygonales, Populus, Primulales, Proteales, Rafflesiales, Ranunculales, Rhamnales, Rosales, Rubiales, Salicales, Santales, Sapindales, Sarraceniaceae, Scrophulariales, Solanales, Trochodendrales, Theales, Umbellales, Urticales, and Violales. The methods and compositions described herein also can be utilized with monocotyledonous plants such as those belonging to the orders Alismatales, Arales, Arecales, Asparagales, Bromeliales, Commelinales, Cyclanthales, Cyperales, Eriocaulales, Hydrocharitales, Juncales, Liliales, Najadales, Orchidales, Pandanales, Poales, Restionales, Triuridales, Typhales, Zingiberales, and with plants belonging to Gymnospermae, e.g., Cycadales, Ginkgoales, Gnetales, and Pinales.

[0205] The methods and compositions can be used over a broad range of plant species, including species from the dicot genera Amaranthus, Anacardium, Arachis, Azadirachta, Brassica, Calendula, Camellia, Canarium, Cannabis, Capsicum, Carthamus, Cicer, Cichorium, Cinnamomum, Citrus, Citrullus, Coffea, Corylus, Crambe, Cucumis, Cucurbita, Daucus, Dioscorea, Fragaria, Glycine, Gossypium, Helianthus, Jatropha, Juglans, Lactuca, Lens, Linum, Lycopersicon, Malus, Mangifera, Medicago, Mentha, Nicotiana, Ocimum, Olea, Papaver, Persea, Phaseolus, Pistacia, Pisum, Prunus, Pyrus, Ricinus, Rosmarinus, Salvia, Sesamum, Simmondsia, Solanum, Spinacia, Theobroma, Thymus, Trifolium, Vaccinium, Vigna, and Vitis; and the monocot genera Allium, Ananas, Asparagus, Avena, Cocos, Curcuma, Elaeis, Festuca, Festulolium, Hordeum, Lemna, Lolium, Miscanthus, Musa, Oryza, Panicum, Pennisetum, Phleum, Poa, Saccharum, Secale, Sorghum, Triticosecale, Triticum, and Zea; and the gymnosperm genera Abies, Cunninghamia, Picea, Pinus, and Pseudotsuga.

[0206] The methods and compositions described herein also can be used with brown seaweeds, e.g., Ascophyllum nodosum, Fucus vesiculosus, Fucus serratus, Himanthalia elongata, and Undaria pinnatifida; red seaweeds, e.g., Chondrus crispus, Cracilaria verrucosa, Porphyra umbilicalis, and Palmaria palmata; green seaweeds, e.g., Enteromorpha spp. and Ulva spp.; and microalgae, e.g., Spirulina spp. (S. platensis and S. maxima) and Odontella aurita. In addition, the methods and compositions can be used with Crypthecodinium cohnii, Schizochytrium spp., and Haematococcus pluvialis.

[0207] In some embodiments, a plant is a member of the species Arachis hypogea, Brassica spp., Carthamus tinctorius, Elaeis oleifera, Glycine max, Gossypium spp., Helianthus annuus, Jatropha curcas, Linum usitatissimum, Miscanthus hybrid (Miscanthus×giganteus), Miscanthus sinensis, Miscanthus sacchariflorus, Panicum virgatum, Populus balsamifera, Saccharum spp., Sorghum bicolor, Triticum aestivum, or Zea mays.

### Methods of Inhibiting Expression of Oil-Modulating Polypeptides

[0208] The polynucleotides and recombinant vectors described herein can be used to express or inhibit expression of an oil-modulating polypeptide in a plant species of interest. The term “expression” refers to the process of converting genetic information of a polynucleotide into RNA through transcription, which is catalyzed by an enzyme, RNA polymerase, and into protein, through translation of mRNA on ribosomes. “Up-regulation” or “activation” refers to regulation that increases the production of expression products (mRNA, polypeptide, or both) relative to basal or native states, while “down-regulation” or “repression” refers to regulation that decreases production of expression products (mRNA, polypeptide, or both) relative to basal or native states.

[0209] A number of nucleic-acid based methods, including antisense RNA, co-suppression, ribozyme directed RNA cleavage, and RNA interference (RNAi) can be used to inhibit protein expression in plants. Antisense technology is one well-known method. In this method, a nucleic acid segment from a gene to be repressed is cloned and operably linked to a promoter so that the antisense strand of RNA is transcribed. The recombinant vector is then transformed into plants, as described above, and the antisense strand of RNA is produced. The nucleic acid segment need not be the entire sequence of the gene to be repressed, but typically will be substantially complementary to at least a portion of the sense strand of the gene to be repressed. Generally, higher homology can be used to compensate for the use of a shorter sequence. Typically, a sequence of at least 30 nucleotides is used, e.g., at least 40, 50, 80, 100, 200, 500 nucleotides or more.

[0210] Thus, for example, an isolated nucleic acid provided herein can be an antisense nucleic acid to any of the aforementioned nucleic acids encoding an oil-modulating polypeptide as set forth in SEQ ID NO:80, SEQ ID NOs:82-85, SEQ ID NOs:87-127, SEQ ID NOs:129-130, SEQ ID NOs:132-133, SEQ ID NOs:135-138, SEQ ID NOs:140-146, SEQ ID NOs:148-149, SEQ ID NO:151, SEQ ID NO:153, SEQ ID NOs:155-160, SEQ ID NOs:162-164, SEQ ID NO:166, SEQ ID NOs:168-171, SEQ ID NO:173, SEQ ID NOs:175-177, SEQ ID NOs:179-183, SEQ ID NOs:185-188, SEQ ID NOs:190-193, SEQ ID NOs:195-196, SEQ ID NOs:198-199, SEQ ID NO:201, SEQ ID NOs:203-214, SEQ ID NO:216, SEQ ID NO:218, SEQ ID NOs:220-227, SEQ ID NOs:229-230, SEQ ID NOs:232-235, SEQ ID NOs:237-243, SEQ ID NO:245, SEQ ID NOs:247-249, SEQ ID NO:309, SEQ ID NO:311, SEQ ID NO:313, SEQ ID NO:315, SEQ ID NOs:317-318, SEQ ID NOs:320-321, SEQ ID NO:323, SEQ ID NO:325, SEQ ID NO:327, SEQ ID NO:329, SEQ ID NOs:331-332, SEQ ID NOs:334-335, SEQ ID NOs:337-338, SEQ ID NOs:340-341, SEQ ID NOs:343-344, SEQ ID NO:346, SEQ ID NO:348, SEQ ID NO:350, SEQ ID NOs:352-353, SEQ ID NO:355, SEQ ID NO:357, SEQ ID NOs:359-360, SEQ ID NO:367, or SEQ ID NOs:415-441. A nucleic acid that decreases the level of a transcription or translation product of a gene encoding an oil-modulating polypeptide is transcribed into an antisense nucleic acid that anneals to the sense coding sequence of the oil-modulating polypeptide.

[0211] Constructs containing operably linked nucleic acid molecules in the sense orientation can also be used to inhibit the expression of a gene. The transcription product can be similar or identical to the sense coding sequence of an oil-modulating polypeptide. The transcription product can also be unpolyadenylated, lack a 5′ cap structure, or contain an unsplicable intron. Methods of co-suppression using a full-length cDNA as well as a partial cDNA sequence are known in the art. See, e.g., U.S. Pat. No. 5,231,020.

[0212] In another method, a nucleic acid can be transcribed into a ribozyme, or catalytic RNA, that affects expression of an mRNA. (See, U.S. Pat. No. 6,423,885). Ribozymes can be designed to specifically pair with virtually any target mRNA and cleave the phosphodiester backbone at a specific location, thereby functionally inactivating the target RNA. Heterologous nucleic acids can encode ribozymes designed to cleave particular mRNA transcripts, thus preventing expression of a polypeptide. Hammerhead ribozymes are useful for destroying particular mRNAs, although various ribozymes that cleave mRNA at site-specific recognition sequences can be used. Hammerhead ribozymes cleave mRNAs at locations dictated by flanking regions that form complementary base pairs with the target mRNA. The sole requirement is that the target RNA contain a 5′-UG-3′ nucleotide sequence. The construction and production of hammerhead ribozymes is known in the art. See, for example, U.S. Pat. No. 5,254,678 and WO 02/46449 and references cited therein. Hammerhead ribozyme sequences can be embedded in a stable RNA such as a transfer RNA (tRNA) to increase cleavage efficiency in vivo. Perriman et al., Proc. Natl. Acad. Sci. USA, 92(13):6175-6179 (1995); de Feyter and Gaudron, Methods in Molecular Biology, Vol. 74, Chapter 43, “Expressing Ribozyrnes in Plants,” Edited by Turner, P. C., Humana Press Inc., Totowa, N. J. RNA endoribonucleases which have been described, such as the one that occurs naturally in Tetrahymena thermophila, can be useful. See, for example, U.S. Pat. Nos. 4,987,071 and 6,423,885.

[0213] RNAi can also be used to inhibit the expression of a gene. For example, a construct can be prepared that includes a sequence that is transcribed into an interfering RNA. Such an RNA can be one that can anneal to itself, e.g., a double stranded RNA having a stem-loop structure. One strand of the stem portion of a double stranded RNA comprises a sequence that is similar or identical to the sense coding sequence of the polypeptide of interest, and that is from about 10 nucleotides to about 2,500 nucleotides in length. The length of the sequence that is similar or identical to the sense coding sequence can be from 10 nucleotides to 500 nucleotides, from 15 nucleotides to 300 nucleotides, from 20 nucleotides to 100 nucleotides, or from 25 nucleotides to 100 nucleotides. The other strand of the stem portion of a double stranded RNA comprises a sequence that is similar or identical to the antisense strand of the coding sequence of the polypeptide of interest, and can have a length that is shorter, the same as, or longer than the corresponding length of the sense sequence. The loop portion of a double stranded RNA can be from 10 nucleotides to 5,000 nucleotides, e.g., from 15 nucleotides to 1,000 nucleotides, from 20 nucleotides to 500 nucleotides, or from 25 nucleotides to 200 nucleotides. The loop portion of the RNA can include an intron. A construct including a sequence that is transcribed into an interfering RNA is transformed into plants as described above. Methods for using RNAi to inhibit the expression of a gene are known to those of skill in the art. See, e.g., U.S. Pat. Nos. 5,034,323; 6,326,527; 6,452,067; 6,573,099; 6,753,139; and 6,777,588. See also WO 97/01952; WO 98/53083; WO 99/32619; WO 98/36083; and U.S. Patent Publications 20030175965, 20030175783, 20040214330, and 20030180945.

[0214] In some nucleic-acid based methods for inhibition of gene expression in plants, a suitable nucleic acid can be a nucleic acid analog. Nucleic acid analogs can be modified at the base moiety, sugar moiety, or phosphate backbone to improve, for example, stability, hybridization, or solubility of the nucleic acid. Modifications at the base moiety include deoxyuridine for deoxythymidine, and 5-methyl-2′-deoxycytidine and 5-bromo-2′-deoxycytidine for deoxycytidine. Modifications of the sugar moiety include modification of the 2′ hydroxyl of the ribose sugar to form 2′-O-methyl or 2′-O-allyl sugars. The deoxyribose phosphate backbone can be modified to produce morpholino nucleic acids, in which each base moiety is linked to a six-membered morpholino ring, or peptide nucleic acids, in which the deoxyphosphate backbone is replaced by a pseudopeptide backbone and the four bases are retained. See, for example, Surnmerton and Weller, 1997, Antisense Nucleic Acid Drug Dev., 7:187-195; Hyrup et al., Bioorgan. Med. Chem., 4:5-23 (1996). In addition, the deoxyphosphate backbone can be replaced with, for example, a phosphorothioate or phosphorodithioate backbone, a phosphoroamidite, or an alkyl phosphotriester backbone.

### Transgenic Plant Phenotypes

[0215] A transformed cell, callus, tissue, or plant can be identified and isolated by selecting or screening the engineered plant material for particular traits or activities, e.g., expression of a selectable marker gene or modulation of oil content. Such screening and selection methodologies are well known to those having ordinary skill in the art. In addition, physical and biochemical methods can be used to identify transformants. These include Southern analysis or PCR amplification for detection of a polynucleotide; Northern blots, S1 RNase protection, primer-extension, or RT-PCR amplification for detecting RNA transcripts; enzymatic assays for detecting enzyme or ribozyme activity of polypeptides and polynucleotides; and protein gel electrophoresis, Western blots, immunoprecipitation, and enzyme-linked immunoassays to detect polypeptides. Other techniques such as in situ hybridization, enzyme staining, and immunostaining also can be used to detect the presence or expression of polypeptides and/or polynucleotides. Methods for performing all of the referenced techniques are well known.

[0216] A population of transgenic plants can be screened and/or selected for those members of the population that have a desired trait or phenotype conferred by expression of the transgene. Selection and/or screening can be carried out over one or more generations, which can be useful to identify those plants that have a desired trait, such as a modulated level of oil. Selection and/or screening can also be carried out in more than one geographic location. In some cases, transgenic plants can be grown and selected under conditions which induce a desired phenotype or are otherwise necessary to produce a desired phenotype in a transgenic plant. In addition, selection and/or screening can be carried out during a particular developmental stage in which the phenotype is exhibited by the plant.

[0217] The phenotype of a transgenic plant can be evaluated relative to a control plant that does not express the exogenous polynucleotide of interest, such as a corresponding wild type plant, a corresponding plant that is not transgenic for the exogenous polynucleotide of interest but otherwise is of the same genetic background as the transgenic plant of interest, or a corresponding plant of the same genetic background in which expression of the polypeptide is suppressed, inhibited, or not induced (e.g., where expression is under the control of an inducible promoter). A plant can be said “not to express” a polypeptide when the plant exhibits less than 10%, e.g., less than 9%, 8%, 7%, 6%, 5%, 4%, 3%, 2%, 1%, 0.5%, 0.1%, 0.01%, or 0.001%, of the amount of polypeptide or mRNA encoding the polypeptide exhibited by the plant of interest. Expression can be evaluated using methods including, for example, RT-PCR, Northern blots, S1 RNase protection, primer extensions, Western blots, protein gel electrophoresis, immunoprecipitation, enzyme-linked immunoassays, chip assays, and mass spectrometry. It should be noted that if a polypeptide is expressed under the control of a tissue-preferential or broadly expressing promoter, expression can be evaluated in the entire plant or in a selected tissue. Similarly, if a polypeptide is expressed at a particular time, e.g., at a particular time in development or upon induction, expression can be evaluated selectively at a desired time period.

[0218] In some embodiments, a plant in which expression of an oil-modulating polypeptide is modulated can have increased levels of seed oil. For example, an oil-modulating polypeptide described herein can be expressed in a transgenic plant, resulting in increased levels of seed oil. The seed oil level can be increased by at least 2 percent, e.g., 2, 3, 4, 5, 6, 7, 8, 9, 10, 11, 12, 13, 14, 15, 16, 17, 18, 19, 20, 25, 30, 35, 40, 45, 50, 55, 60, 65, 70, 75, or more than 75 percent, as compared to the seed oil level in a corresponding control plant that does not express the transgene. In some embodiments, a plant in which expression of an oil-modulating polypeptide is modulated can have decreased levels of seed oil. The seed oil level can be decreased by at least 2 percent, e.g., 2, 3, 4, 5, 10, 15, 20, 25, 30, 35, or more than 35 percent, as compared to the seed oil level in a corresponding control plant that does not express the transgene.

[0219] Plants for which modulation of levels of seed oil can be useful include, without limitation, almond, cashew, castor bean, coconut, corn, cotton, flax, hazelnut, hemp, jatropha, linseed, mustard, neem, oil palm, peanut, poppy, pumpkin, rapeseed, rice, safflower, sesame seed, soybean, sunflower, and walnut. Increases in seed oil in such plants can provide increased yields of oil extracted from the seed and increased caloric content in foodstuffs and animal feed produced from the seed. Decreases in seed oil in such plants can be useful in situations where caloric intake should be restricted.

[0220] In some embodiments, a plant in which expression of an oil-modulating polypeptide is modulated can have increased or decreased levels of oil in one or more non-seed tissues, e.g., leaf tissues, stem tissues, root or corn tissues, or fruit tissues other than seed: For example, the oil level can be increased by at least 2 percent, e.g., 2, 3, 4, 5, 6, 7, 8, 9, 10, 11, 12, 13, 14, 15, 16, 17, 18, 19, 20, 25, 30, 35, 40, 45, 50, 55, 60, 65, 70, 75 or more than 75 percent, as compared to the oil level in a corresponding control plant that does not express the transgene. In some embodiments, a plant in which expression of an oil-modulating polypeptide is modulated can have decreased levels of oil in one or more non-seed tissues. The oil level can be decreased by at least 2 percent, e.g., 2, 3, 4, 5, 10, 15, 20, 25, 30, 35, or more than 35 percent, as compared to the oil level in a corresponding control plant that does not express the transgene.

[0221] Plants for which modulation of levels of oil in non-seed tissues can be useful include, without limitation, alfalfa, apple, avocado, beans, carrot, cherry, coconut, coffee, grapefruit, lemon, lettuce, oat, olive, onion, orange, palm, peach, peanut, pear, pineapple, potato, ryegrass, sudangrass, switchgrass, and tomato. Increases in non-seed oil in such plants can provide increased oil and caloric content in edible plants, including animal forage.

[0222] In some embodiments, a plant in which expression of an oil-modulating polypeptide having an amino acid sequence corresponding to SEQ ID NO:367, SEQ ID NO:151, SEQ ID NO:162, or SEQ ID NO:148 is modulated can have increased levels of seed protein accompanying increased levels of seed oil. The protein level can be increased by at least 2 percent, e.g., 3, 4, 5, 6, 8, 10, 15, 20, 25, 30, 35, or 40 percent, as compared to the protein level in a corresponding control plant that does not express the transgene.

[0223] In some embodiments, a plant in which expression of an oil-modulating polypeptide having an amino acid sequence corresponding to SEQ ID NO:148 is modulated can have increased levels of seed protein accompanying decreased levels of seed oil. The protein level can be increased by at least 2 percent, e.g., 3, 4, 5, 6, 8, 10, 15, 20, 25, 30, 35, or 40 percent, as compared to the protein level in a corresponding control plant that does not express the transgene.

[0224] In some embodiments, a plant in which expression of an oil-modulating polypeptide having an amino acid sequence corresponding to SEQ ID NO:82 or SEQ ID NO:87 is modulated can have decreased levels of seed protein accompanying increased levels of seed oil. The protein level can be decreased by at least 2 percent, e.g., 2, 3, 4, 5, 10, 15, 20, 25, 30, 35, or more than 35 percent, as compared to the protein level in a corresponding control plant that does not express the transgene.

[0225] In some embodiments, a plant in which expression of an oil-modulating polypeptide having an amino acid sequence corresponding to SEQ ID NO:148 is modulated can have increased levels of seed oleic acid accompanying increased levels of seed oil and protein. The oleic acid level can be increased by at least 2 percent, e.g., 2, 3, 4, 5, 10, 15, 20, 25, 30, or more than 30 percent, as compared to the oleic acid level in a corresponding control plant that does not express the transgene.

[0226] In some embodiments, a plant in which expression of an oil-modulating polypeptide having an amino acid sequence corresponding to SEQ ID NO:148 is modulated can have decreased levels of seed oleic acid accompanying increased levels of seed oil and protein. The oleic acid level can be decreased by at least 2 percent, e.g., 2, 3, 4, 5, 10, 15, 20, 25, 30, or more than 30 percent, as compared to the oleic acid level in a corresponding control plant that does not express the transgene.

[0227] In some embodiments, a plant in which expression of an oil-modulating polypeptide having an amino acid sequence corresponding to SEQ ID NO:148 is modulated can have decreased level of seed oleic acid accompanying decreased levels of seed oil and increased levels of seed protein. The oleic acid level can be decreased by at least 2 percent, e.g., 2, 3, 4, 5, 10, 15, 20, 25, 30, or more than 30 percent, as compared to the oleic acid level in a corresponding control plant that does not express the transgene.

[0228] Typically, a difference (e.g., an increase) in the amount of oil or protein in a transgenic plant or cell relative to a control plant or cell is considered statistically significant at p≦0.05 with an appropriate parametric or non-parametric statistic, e.g., Chi-square test, Student's t-test, Mann-Whitney test, or F-test. In some embodiments, a difference in the amount of oil or protein is statistically significant at p<0.01, p<0.005, or p<0.001. A statistically significant difference in, for example, the amount of oil in a transgenic plant compared to the amount in cells of a control plant indicates that (1) the recombinant nucleic acid present in the transgenic plant results in altered oil levels and/or (2) the recombinant nucleic acid warrants further study as a candidate for altering the amount of oil in a plant.

[0229] Information that the polypeptides disclosed herein can modulate oil content can be useful in breeding of crop plants. Based on the effect of disclosed polypeptides on oil content, one can search for and identify polymorphisms linked to genetic loci for such polypeptides. Polymorphisms that can be identified include simple sequence repeats (SSRs), rapid amplification of polymorphic DNA (RAPDs), amplified fragment length polymorphisms (AFLPs) and restriction fragment length polymorphisms (RFLPs).

[0230] If a polymorphism is identified, its presence and frequency in populations is analyzed to determine if it is statistically significantly correlated to an alteration in oil content. Those polymorphisms that are correlated with an alteration in oil content can be incorporated into a marker assisted breeding program to facilitate the development of lines that have a desired alteration in oil content. Typically, a polymorphism identified in such a manner is used with polymorphisms at other loci that are also correlated with a desired alteration in oil content.

### Articles of Manufacture

[0231] Transgenic plants provided herein have particular uses in the agricultural and nutritional industries. For example, transgenic plants described herein can be used to make food products and animal feed. Suitable plants with which to make such products include almond, avocado, cashew, coconut, corn, flax, olive, peanut, soybean, sunflower, and walnut. Such products are useful to provide increased or decreased oil and caloric content in the diet.

[0232] Transgenic plants provided herein can also be used to make vegetable oil. Vegetable oils can be chemically extracted from transgenic plants using a solvent, such as hexane. In some cases, olive, coconut and palm oils can be produced by mechanical extraction, such as expeller-pressed extraction. Oil presses, such as the screw press and the ram press, can also be used. Suitable plants from which to make oil include almond, apricot, avocado, canola, cashew, castor bean, coconut, corn, cotton, flax, grape, hazelnut, hemp, mustard, neem, olive, palm, peanut, poppy, pumpkin, rapeseed, rice, safflower, sesame, soybean, sunflower, and walnut. Such oils can be used for frying, baking, and spray coating applications. Vegetable oils also can be used to make margarine, processed foods, oleochemicals, and essential oils. Vegetable oils are used in the electrical industry as insulators. Vegetable oils are also used as lubricants. Vegetable oil derivatives can be used in the manufacture of polymers.

[0233] Vegetable oil from transgenic plants provided herein can also be used as fuel. For example, vegetable oil can be used as fuel in a vehicle that heats the oil before it enters the fuel system. Heating vegetable oil to 150° F. reduces the viscosity of the oil sufficiently for use in diesel engines, such as Mercedes-Benz® diesel engines. The viscosity of the oil can also be reduced before it enters the tank so that neither the engine nor the vehicle needs modification. Methods of reducing oil viscosity include: transesterification, pyrolysis, micro emulsion, blending and thermal depolymerization. The transesterification refining process creates esters from vegetable oil by using an alcohol in the presence of a catalyst. This reaction takes a triglyceride molecule, or a complex fatty acid, neutralizes the free fatty acids and removes the glycerin, thereby creating an alcohol ester. One method of transesterification mixes methanol with sodium hydroxide and then aggressively mixes the resulting methoxide with vegetable oil, which results in a methyl ester. Ester-based oxygenated fuel made from vegetable oil is known as biodiesel. Biodiesel can be used as a pure fuel or blended with petroleum in any percentage. B5 biodiesel, for example, is a blend of 5% biodiesel and 95% petroleum diesel. B20 biodiesel, including BioWillie® diesel fuel, is produced by blending 20% biodiesel and 80% petroleum diesel.

[0234] Use of biodiesel is beneficial for the environment because it is associated with reduced emissions compared to the use of petroleum diesel. In addition, biodiesel is a biodegradable, nontoxic fuel that is made from renewable materials. Plants that can be used as sources of oil for biodiesel production include canola, cotton, flax, jatropha, oil palm, safflower, soybean, and sunflower.

[0235] Seeds of transgenic plants described herein can be conditioned and bagged in packaging material by means known in the art to form an article of manufacture. Packaging material such as paper and cloth are well known in the art. A package of seed can have a label e.g., a tag or label secured to the packaging material, a label printed on the packaging material, or a label inserted within the package.

[0236] The invention will be further described in the following examples, which do not limit the scope of the invention described in the claims.

### EXAMPLES

### Example 1

### Transgenic Plants

[0237] The following symbols are used in the Examples: T₁: first generation transformant; T₂: second generation, progeny of self-pollinated T₁ plants; T₃: third generation, progeny of self-pollinated T₂ plants; T₄: fourth generation, progeny of self-pollinated T₃ plants. Independent transformations are referred to as events.

[0238] The following is a list of nucleic acids that were isolated from Arabidopsis thaliana plants. SEQ ID NO:366 is a DNA clone that is predicted to encode a 294 amino acid polypeptide (SEQ ID NO:367). Ceres CDNA ID no. 12703936 (SEQ ID NO:150) is a genomic DNA clone that is predicted to encode a 221 amino acid polypeptide (genomic locus At5g12230; SEQ ID NO:151). Ceres CDNA ID no. 23649975 (SEQ ID NO:147) is a genomic DNA clone that is predicted to encode a 190 amino acid ankyrin repeat family polypeptide (genomic locus At2g26210; SEQ ID NO:148). Ceres CDNA ID no. 12706677 (SEQ ID NO:161) is a genomic DNA clone that is predicted to encode a 176 amino acid glycosyltransferase polypeptide (genomic locus At4g16710; SEQ ID NO:162). Ceres CLONE ID no. 5344 (SEQ ID NO:86) is a cDNA clone that is predicted to encode a 332 amino acid polygalacturonase inhibiting protein-1 polypeptide (genomic locus At5g06860; SEQ ID NO:87). Ceres CLONE ID no. 2721 (SEQ ID NO:202) is a DNA clone that is predicted to encode a 131 amino acid polypeptide (SEQ ID NO:203). Ceres CLONE ID no. 37493 (SEQ ID NO:244) is a DNA clone that is predicted to encode a 386 amino acid methyltransferase polypeptide (SEQ ID NO:245). Ceres CLONE ID no. 36334 (SEQ ID NO:228) is a DNA clone that is predicted to encode a 472 amino acid cytochrome P450 polypeptide (SEQ ID NO:229). Ceres CLONE ID no. 30018 (SEQ ID NO:215) is a DNA clone that is predicted to encode a 72 amino acid ubiquinol-cytochrome C reductase, UQCRX/QCR9 like polypeptide (SEQ ID NO:216). Ceres ANNOT ID no. 542494 (SEQ ID NO:361) is a DNA clone that is predicted to encode a 142 amino acid polypeptide (SEQ ID NO:175). Ceres ANNOT ID no. 841273 (SEQ ID NO:363) is a DNA clone that is predicted to encode a 262 amino acid endonuclease/exonuclease/phosphatase family polypeptide (SEQ ID NO:201). Ceres ANNOT ID no. 564261 (SEQ ID NO:364) is a DNA clone that is predicted to encode a 249 amino acid polypeptide containing a DnaJ domain (SEQ ID NO:190). Ceres ANNOT ID no. 565548 (SEQ ID NO:365) is a DNA clone that is predicted to encode a 245 amino acid Rho termination factor polypeptide (SEQ ID NO:198). Ceres ANNOT ID no. 549258 (SEQ ID NO:362) is a DNA clone that is predicted to encode a 256 amino acid acetyltransferase polypeptide (SEQ ID NO:185).

[0239] The following is a list of nucleic acids that were isolated from Glycine max plants. Ceres CLONE ID no. 590462 (SEQ ID NO:79) is a cDNA clone that is predicted to encode a 75 amino acid polypeptide (SEQ ID NO:80). Ceres CLONE ID no. 625035 (SEQ ID NO:81) is a cDNA clone that is predicted to encode a 240 amino acid AP2/EREBP transcription factor polypeptide (SEQ ID NO:82).

[0240] Each isolated nucleic acid described above was cloned into a Ti plasmid vector, CRS 338, containing a phosphinothricin acetyltransferase gene which confers Finale™ resistance to transformed plants. Constructs were made using CRS 338 that contained SEQ ID NO:366, Ceres CDNA ID no. 12703936, Ceres CDNA ID no. 23649975, Ceres CDNA ID no. 12706677, Ceres CLONE ID no. 5344, Ceres CLONE ID no. 2721, Ceres CLONE ID no. 37493, Ceres CLONE ID no. 36334, Ceres CLONE ID no. 30018, Ceres ANNOT ID no. 542494, Ceres ANNOT ID no. 841273, Ceres ANNOT ID no. 564261, Ceres ANNOT ID no. 565548, Ceres ANNOT ID no. 549258, Ceres CLONE ID no. 590462, or Ceres CLONE ID no. 625035, each operably linked to a CaMV 35S promoter. Wild-type Arabidopsis thaliana ecotype Wassilewskija (Ws) plants were transformed separately with each construct. The transformations were performed essentially as described in Bechtold et al., C.R. Acad. Sci. Paris, 316:1194-1199 (1993).

[0241] Transgenic Arabidopsis lines containing SEQ ID NO:366, Ceres CDNA ID no. 12703936, Ceres CDNA ID no. 23649975, Ceres CDNA ID no. 12706677, Ceres CLONE ID no. 5344, Ceres CLONE ID no. 2721, Ceres CLONE ID no. 37493, Ceres CLONE ID no. 36334, Ceres CLONE ID no. 30018, Ceres ANNOT ID no. 542494, Ceres ANNOT ID no. 841273, Ceres ANNOT ID no. 564261, Ceres ANNOT ID no. 565548, Ceres ANNOT ID no. 549258, Ceres CLONE ID no. 590462, or Ceres CLONE ID no. 625035 were designated ME11833, ME11278, ME11273, ME11822, ME05421, ME03392, ME03531, ME06302, ME06741, ME09515, ME11271, ME11827, ME11836, ME11837, ME03169, or ME03180, respectively. The presence of each vector containing a DNA clone described above in the respective transgenic Arabidopsis line transformed with the vector was confirmed by Finale™ resistance, polymerase chain reaction (PCR) amplification from green leaf tissue extract, and/or sequencing of PCR products. As controls, wild-type Arabidopsis ecotype Ws plants were transformed with the empty vector CRS 338.

### Example 2

### Analysis of Oil Content in Transgenic Arabidopsis Seeds

[0242] An analytical method based on Fourier transform near-infrared (FT-NIR) spectroscopy was developed, validated, and used to perform a high-throughput screen of transgenic seed lines for alterations in seed oil content. To calibrate the FT-NIR spectroscopy method, a sub-population of transgenic seed lines was randomly selected and analyzed for oil content using a direct primary method. Fatty acid methyl ester (FAME) analysis by gas chromatography-mass spectroscopy (GC-MS) was used as the direct primary method to determine the total fatty acid content for each seed line and produce the FT-NIR spectroscopy calibration curves for oil.

[0243] To analyze seed oil content using GC-MS, seed tissue was homogenized in liquid nitrogen using a mortar and pestle to create a powder. The tissue was weighed, and 5.0±0.25 mg were transferred into a 2 mL Eppendorf tube. The exact weight of each sample was recorded. One mL of 2.5% H₂SO₄ (v/v in methanol) and 20 μL of undecanoic acid internal standard (1 mg/mL in hexane) were added to the weighed seed tissue. The tubes were incubated for two hours at 90° C. in a pre-equilibrated heating block. The samples were removed from the heating block and allowed to cool to room temperature. The contents of each Eppendorf tube were poured into a 15 mL polypropylene conical tube, and 1.5 mL of a 0.9% NaCl solution and 0.75 mL of hexane were added to each tube. The tubes were vortexed for 30 seconds and incubated at room temperature for 15 minutes. The samples were then centrifuged at 4,000 rpm for 5 minutes using a bench top centrifuge. If emulsions remained, then the centrifugation step was repeated until they were dissipated. One hundred μL of the hexane (top) layer was pipetted into a 1.5 mL autosampler vial with minimum volume insert. The samples were stored no longer than 1 week at −80° C. until they were analyzed.

[0244] Samples were analyzed using a Shimadzu QP-2010 GC-MS (Shimadzu Scientific Instruments, Columbia, Md.). The first and last sample of each batch consisted of a blank (hexane). Every fifth sample in the batch also consisted of a blank. Prior to sample analysis, a 7-point calibration curve was generated using the Supelco 37 component FAME mix (0.00004 mg/mL to 0.2 mg/mL). The injection volume was 1 μL.

[0245] The GC parameters were as follows: column oven temperature: 70° C., inject temperature: 230° C., inject mode: split, flow control mode: linear velocity, column flow: 1.0 mL/min, pressure: 53.5 mL/min, total flow: 29.0 mL/min, purge flow: 3.0 mL/min, split ratio: 25.0. The temperature gradient was as follows: 70° C. for 5 minutes, increasing to 350° C. at a rate of 5 degrees per minute, and then held at 350° C. for 1 minute. The MS parameters were as follows: ion source temperature: 200° C., interface temperature: 240° C., solvent cut time: 2 minutes, detector gain mode: relative, detector gain: 0.6 kV, threshold: 1000, group: 1, start time: 3 minutes, end time: 62 minutes, ACQ mode: scan, interval: 0.5 second, scan speed: 666, start M/z: 40, end M/z: 350. The instrument was tuned each time the column was cut or a new column was used.

[0246] The data were analyzed using the Shimadzu GC-MS Solutions software. Peak areas were integrated and exported to an Excel spreadsheet. Fatty acid peak areas were normalized to the internal standard, the amount of tissue weighed, and the slope of the corresponding calibration curve generated using the FAME mixture. Peak areas were also multiplied by the volume of hexane (0.75 mL) used to extract the fatty acids.

[0247] The same seed lines that were analyzed using GC-MS were also analyzed by FT-NIR spectroscopy, and the oil values determined by the GC-MS primary method were entered into the FT-NIR chemometrics software (Bruker Optics, Billerica, Mass.) to create a calibration curve for oil content. The actual oil content of each seed line analyzed using GC-MS was plotted on the x-axis of the calibration curve. The y-axis of the calibration curve represented the predicted values based on the best-fit line. Data points were continually added to the calibration curve data set.

[0248] T₂ seed from each transgenic plant line was analyzed by FT-NIR spectroscopy. Sarstedt tubes containing seeds were placed directly on the lamp, and spectra were acquired through the bottom of the tube. The spectra were analyzed to determine seed oil content using the FT-NIR chemometrics software (Bruker Optics) and the oil calibration curve. Results for experimental samples were compared to population means and standard deviations calculated for transgenic seed lines that were planted within 30 days of the lines being analyzed and grown under the same conditions. Typically, results from three to four events of each of 400 to 1600 different transgenic lines were used to calculate a population mean. Each data point was assigned a z-score (z=(x−mean)/std), and a p-value was calculated for the z-score.

[0249] Transgenic seed lines with oil levels in T₂ seed that differed by more than two standard deviations from the population mean were selected for evaluation of oil levels in the T₃ generation. All events of selected lines were planted in individual pots. The pots were arranged randomly in flats along with pots containing matched control plants in order to minimize microenvironment effects. Matched control plants contained an empty version of the vector used to generate the transgenic seed lines. T₃ seed from up to five plants from each event was collected and analyzed individually using FT-NIR spectroscopy. Data from replicate samples were averaged and compared to controls using the Student's t-test.

### Example 3

### Analysis of Protein Content in Transgenic Arabidopsis Seeds

[0250] An analytical method based on Fourier transform near-infrared (FT-NIR) spectroscopy was developed, validated, and used to perform a high-throughput screen of transgenic seed lines for alterations in seed protein content. To calibrate the FT-NIR spectroscopy method, total nitrogen elemental analysis was used as a primary method to analyze a sub-population of randomly selected transgenic seed lines. The overall percentage of nitrogen in each sample was determined. Percent nitrogen values were multiplied by a conversion factor to obtain percent total protein values. A conversion factor of 5.30 was selected based on data for cotton, sunflower, safflower, and sesame seed (Rhee, K. C., Determination of Total Nitrogen In Handbook of Food Analytical Chemistry—Water, Proteins, Enzymes, Lipids, and Carbohydrates (R. Wrolstad et al., ed.), John Wiley and Sons, Inc., p. 105, (2005)). The same seed lines were then analyzed by FT-NIR spectroscopy, and the protein values calculated via the primary method were entered into the FT-NIR chemometrics software (Bruker Optics, Billerica, Mass.) to create a calibration curve for analysis of seed protein content by FT-NIR spectroscopy.

[0251] Elemental analysis was performed using a FlashEA 112 NC Analyzer (Thermo Finnigan, San Jose, Calif.). To analyze total nitrogen content, 2.00±0.15 mg of dried transgenic Arabidopsis seed was weighed into a tared tin cup. The tin cup with the seed was weighed, crushed, folded in half, and placed into an autosampler slot on the FlashEA 1112 NC Analyzer (Thermo Finnigan). Matched controls were prepared in a manner identical to the experimental samples and spaced evenly throughout the batch. The first three samples in every batch were a blank (empty tin cup), a bypass, (approximately 5 mg of aspartic acid), and a standard (5.00±0.15 mg aspartic acid), respectively. Blanks were entered between every 15 experimental samples. Each sample was analyzed in triplicate.

[0252] The FlashEA 1112 NC Analyzer (Thermo Finnigan) instrument parameters were as follows: left furnace 900° C., right furnace 840° C., oven 50° C., gas flow carrier 130 mL/min., and gas flow reference 100 mL/min. The data parameter LLOD was 0.25 mg for the standard and different for other materials. The data parameter LLOQ was 3.0 mg for the standard, 1.0 mg for seed tissue, and different for other materials.

[0253] Quantification was performed using the Eager 300 software (Thermo Finnigan). Replicate percent nitrogen measurements were averaged and multiplied by a conversion factor of 5.30 to obtain percent total protein values. For results to be considered valid, the standard deviation between replicate samples was required to be less than 10%. The percent nitrogen of the aspartic acid standard was required to be within ±1.0% of the theoretical value. For a run to be declared valid, the weight of the aspartic acid (standard) was required to be between 4.85 and 5.15 mg, and the blank(s) were required to have no recorded nitrogen content.

[0254] The same seed lines that were analyzed for elemental nitrogen content were also analyzed by FT-NIR spectroscopy, and the percent total protein values determined by elemental analysis were entered into the FT-NIR chemometrics software (Bruker Optics, Billerica, Mass.) to create a calibration curve for protein content. The protein content of each seed line based on total nitrogen elemental analysis was plotted on the x-axis of the calibration curve. The y-axis of the calibration curve represented the predicted values based on the best-fit line. Data points were continually added to the calibration curve data set.

[0255] T₂ seed from each transgenic plant line was analyzed by FT-NIR spectroscopy. Sarstedt tubes containing seeds were placed directly on the lamp, and spectra were acquired through the bottom of the tube. The spectra were analyzed to determine seed protein content using the FT-NIR chemometrics software (Bruker Optics) and the protein calibration curve. Results for experimental samples were compared to population means and standard deviations calculated for transgenic seed lines that were planted within 30 days of the lines being analyzed and grown under the same conditions. Typically, results from three to four events of each of 400 to 1600 different transgenic lines were used to calculate a population mean. Each data point was assigned a z-score (z=(x−mean)/std), and a p-value was calculated for the z-score.

[0256] Transgenic seed lines with oil levels in T₂ seed that differed by more than two standard deviations from the population mean were also analyzed to determine protein levels in the T₃ generation. Events of selected lines were planted in individual pots. The pots were arranged randomly in flats along with pots containing matched control plants in order to minimize microenvironment effects. Matched control plants contained an empty version of the vector used to generate the transgenic seed lines. T₃ seed from up to five plants from each event was collected and analyzed individually using FT-NIR spectroscopy. Data from replicate samples were averaged and compared to controls using the Student's t-test.

### Example 4

### Results for ME11833 Events

[0257] T₂ and T₃ seed from five events of ME1833 containing SEQ ID NO:366 was analyzed for oil content using FT-NIR spectroscopy as described in Example 2.

[0258] The oil content in T₂ seed from three events of ME11833 was significantly increased compared to the mean oil content in seed from transgenic Arabidopsis lines planted within 30 days of ME11833. As presented in Table 1, the oil content was increased to 124% in seed from event −01 and to 127% in seed from events −03 and −05 compared to the population mean.

TABLE 1
Oil content (% control) in T₂ and T₃ seed from ME11833
events containing SEQ ID NO: 366

| | Event - | Event - | Event - | Event - | Event - | |
|---|---|---|---|---|---|---|
| | 01 | 02 | 03 | 04 | 05 | Control |
| Oil content | 124 | 121 | 127 | 114 | 127 | 100 ± 0* |
| (% control) | | | | | | |
| in T₂ seed | | | | | | |
| p-value | 0.03 | 0.06 | 0.01 | 0.17 | 0.01 | N/A |
| Oil content | 106 ± 1 | 103 ± 1 | 102 | 103 ± 2 | 104 ± 1 | 100 ± 0 |
| (% control) | | | | | | |
| in T₃ seed | | | | | | |
| p-value | 0.03 | 0.01 | 0.66 | 0.29 | <0.01 | N/A |
| No. of | 3 | 5 | 1 | 4 | 3 | 15 |
| T₂ plants | | | | | | |

*Population mean of the oil content of seed from transgenic lines planted within 30 days of ME11833. Variation is presented as the standard error of the mean.

[0259] The oil content in T₃ seed from three events of ME11833 was significantly increased compared to the oil content of corresponding control seed. As presented in Table 1, the oil content was increased to 106%, 103%, and 104% in seed from events −01, −02, and −05, respectively, compared to the oil content in control seed.

[0260] T₂ and T₃ seed from five events of ME11833 containing SEQ ID NO:366 was also analyzed for protein content using FT-NIR spectroscopy as described in Example 3.

[0261] The protein content in T₂ seed from ME11833 events was not observed to differ significantly from the mean protein content in seed from transgenic Arabidopsis lines planted within 30 days of ME11833 (Table 2).

TABLE 2
Protein content (% control) in T₂ and T₃ seed from ME11833
events containing SEQ ID NO: 366

| | Event - | Event - | Event - | Event - | Event - | |
|---|---|---|---|---|---|---|
| | 01 | 02 | 03 | 04 | 05 | Control |
| Protein | 81 | 91 | 84 | 85 | 87 | 100 ± 0* |
| content | | | | | | |
| (% control) | | | | | | |
| in T₂ seed | | | | | | |
| p-value | 0.08 | 0.25 | 0.12 | 0.14 | 0.18 | N/A |
| Protein | 109 ± 2 | 111 ± 2 | 105 | 110 ± 1 | 114 ± 1 | 100 ± 1 |
| content | | | | | | |
| (% control) | | | | | | |
| in T₃ seed | | | | | | |
| p-value | 0.01 | <0.01 | 0.24 | <0.01 | <0.01 | N/A |
| No. of | 3 | 5 | 1 | 4 | 3 | 15 |
| T₂ plants | | | | | | |

*Population mean of the protein content in seed from transgenic lines planted within 30 days of ME11833. Variation is presented as the standard error of the mean.

[0262] The protein content in T₃ seed from four events of ME11833 was significantly increased compared to the protein content in corresponding control seed. As presented in Table 2, the protein content was increased to 109%, 111%, 110%, and 114% in seed from events −01, −02, −04, and −05, respectively, compared to the protein content in control seed.

[0263] The physical appearances of T₁ ME11833 plants were similar to those of corresponding control plants. There were no observable or statistically significant differences between T₂ ME11833 and control plants in germination, onset of flowering, rosette area, fertility, and general morphology/architecture.

### Example 5

### Results for ME11278 Events

[0264] T₂ and T₃ seed from five events of ME11278 containing Ceres CDNA ID no. 12703936 was analyzed for oil content using FT-NIR spectroscopy as described in Example 2.

[0265] The oil content in T₂ seed from five events of ME11278 was significantly increased compared to the mean oil content in seed from transgenic Arabidopsis lines planted within 30 days of ME11278. As presented in Table 3, the oil content was increased to 122%, 128%, 120%, 121%, and 123% in seed from events −01, −02, −03, −04, and −05, respectively, compared to the population mean.

TABLE 3
Oil content (% control) in T₂ and T₃ seed from ME11278
events containing Ceres CDNA ID no. 12703936

| | Event - | Event - | Event - | Event - | Event - | |
|---|---|---|---|---|---|---|
| | 01 | 02 | 03 | 04 | 05 | Control |
| Oil content | 122 | 128 | 120 | 121 | 123 | 100 ± 0* |
| (% control) | | | | | | |
| in T₂ seed | | | | | | |
| p-value | 0.03 | <0.01 | 0.05 | 0.03 | 0.02 | N/A |
| Oil content | 103 ± 0 | 105 ± 0 | 102 ± 0 | 101 ± 2 | 105 ± 1 | 100 ± 0 |
| (% control) | | | | | | |
| in T₃ seed | | | | | | |
| p-value | <0.01 | <0.01 | 0.01 | 0.76 | 0.04 | N/A |
| No. of | 5 | 5 | 5 | 2 | 3 | 15 |
| T₂ plants | | | | | | |

*Population mean of the oil content in seed from transgenic lines planted within 30 days of ME11278. Variation is presented as the standard error of the mean.

[0266] The oil content in T₃ seed from four events of ME11278 was significantly increased compared to the oil content in corresponding control seed. As presented in Table 3, the oil content was increased to 103%, 105%, 102%, and 105% in seed from events −01, −02, −03, and −05, respectively, compared to the oil content in control seed.

[0267] T₂ and T₃ seed from five events of ME11278 containing Ceres CDNA ID no. 12703936 was also analyzed for total protein content using FT-NIR spectroscopy as described in Example 3.

[0268] The protein content in T₂ seed from ME11278 events was not observed to differ significantly from the mean protein content in seed from transgenic Arabidopsis lines planted within 30 days of ME11278 (Table 4).

TABLE 4
Protein content (% control) in T₂ and T₃ seed from ME11278
events containing Ceres CDNA ID no. 12703936

| | Event - | Event - | Event - | Event - | Event - | |
|---|---|---|---|---|---|---|
| | 01 | 02 | 03 | 04 | 05 | Control |
| Protein | 98 | 99 | 97 | 102 | 107 | 100 ± 0* |
| content | | | | | | |
| (% control) | | | | | | |
| in T₂ seed | | | | | | |
| p-value | 0.25 | 0.25 | 0.24 | 0.25 | 0.23 | N/A |
| Protein | 109 ± 1 | 115 ± 1 | 113 ± 2 | 117 ± 2 | 115 ± 5 | 100 ± 1 |
| content | | | | | | |
| (% control) | | | | | | |
| in T₃ seed | | | | | | |
| p-value | <0.01 | <0.01 | <0.01 | 0.06 | 0.11 | N/A |
| No. of | 5 | 5 | 5 | 2 | 3 | 15 |
| T₂ plants | | | | | | |

*Population mean of the protein content in seed from transgenic lines planted within 30 days of ME11278. Variation is presented as the standard error of the mean.

[0269] The protein content in T₃ seed from three events of ME11278 was significantly increased compared to the protein content in corresponding control seed. As presented in Table 4, the protein content was increased to 109%, 115%, and 113% in seed from events −01, −02, and −03, respectively, compared to the protein content in control seed.

[0270] The physical appearances of T₁ ME11278 plants were similar to those of corresponding control plants. There were no observable or statistically significant differences between T₂ ME11278 and control plants in germination, onset of flowering, rosette area, fertility, and general morphology/architecture.

### Example 6

### Results for ME11822 Events

[0271] T₂ and T₃ seed from five events of ME11822 containing Ceres CDNA ID no. 12706677 was analyzed for oil content using FT-NIR spectroscopy as described in Example 2.

[0272] The oil content in T₂ seed from four events of ME11822 was significantly increased compared to the mean oil content in seed from transgenic Arabidopsis lines planted within 30 days of ME11822. As presented in Table 5, the oil content was increased to 123% in seed from event −01 and to 122% in seed from events −02, −03, and −05 compared to the population mean.

TABLE 5
Oil content (% control) in T₂ and T₃ seed from ME11822 events
containing Ceres CDNA ID no. 12706677

| | Event - | Event - | Event - | Event - | Event - | |
|---|---|---|---|---|---|---|
| | 01 | 02 | 03 | 04 | 05 | Control |
| Oil content | 123 | 122 | 122 | 120 | 122 | 100 ± 0* |
| (% control) | | | | | | |
| in T₂ seed | | | | | | |
| p-value | 0.04 | 0.05 | 0.05 | 0.07 | 0.05 | N/A |
| Oil content | 101 ± 0 | 104 ± 1 | 105 ± 0 | 100 ± 1 | 100 ± 2 | 100 ± 0 |
| (% control) | | | | | | |
| in T₃ seed | | | | | | |
| p-value | 0.07 | <0.01 | <0.01 | 0.85 | 0.97 | N/A |
| No. of | 5 | 4 | 5 | 3 | 3 | 15 |
| T₂ plants | | | | | | |

*Population mean of the oil content in seed from transgenic lines planted within 30 days of ME11822. Variation is presented as the standard error of the mean.

[0273] The oil content in T₃ seed from two events of ME11822 was significantly increased compared to the oil content in corresponding control seed. As presented in Table 5, the oil content was increased to 104% and 105% in seed from events −02 and −03, respectively, compared to the oil content in control seed.

[0274] T₂ and T₃ seed from five events of ME11822 containing Ceres CDNA ID no. 12706677 was also analyzed for total protein content using FT-NIR spectroscopy as described in Example 3.

[0275] The protein content in T₂ seed from ME11822 events was not observed to differ significantly from the mean protein content in seed from transgenic Arabidopsis lines planted within 30 days of ME11822 (Table 6).

TABLE 6
Protein content (% control) in T₂ and T₃ seed from ME11822 events
containing Ceres CDNA ID no. 12706677

| | Event - | Event - | Event - | Event - | Event - | |
|---|---|---|---|---|---|---|
| | 01 | 02 | 03 | 04 | 05 | Control |
| Protein | 87 | 92 | 84 | 98 | 93 | 100 ± 0* |
| content | | | | | | |
| (% control) | | | | | | |
| in T₂ seed | | | | | | |
| p-value | 0.17 | 0.27 | 0.12 | 0.34 | 0.28 | N/A |
| Protein | 108 ± 1 | 110 ± 3 | 108 ± 2 | 109 ± 2 | 109 ± 2 | 100 ± 1 |
| content | | | | | | |
| (% control) | | | | | | |
| in T₃ seed | | | | | | |
| p-value | <0.01 | 0.03 | 0.01 | 0.03 | 0.01 | N/A |
| No. of | 5 | 4 | 5 | 3 | 3 | 15 |
| T₂ plants | | | | | | |

*Population mean of the protein content in seed from transgenic lines planted within 30 days of ME11822. Variation is presented as the standard error of the mean.

[0276] The protein content in T₃ seed from five events of ME11822 was significantly increased compared to the protein content in corresponding control seed. As presented in Table 6, the protein content was increased to 108% in seed from events −01 and −03, to 110% in seed from event −02, and to 109% in seed from events −04 and −05 compared to the protein content in control seed.

[0277] The physical appearances of T₁ ME11822 plants were similar to those of corresponding control plants. There were no observable or statistically significant differences between T₂ ME11822 and control plants in germination, onset of flowering, rosette area, fertility, and general morphology/architecture.

### Example 7

### Results for ME11273 Events

[0278] T₂ and T₃ seed from five events of ME11273 containing Ceres CDNA ID no. 23649975 was analyzed for oil content using FT-NIR spectroscopy as described in Example 2.

[0279] The oil content in T₂ seed from three events of ME11273 was significantly increased compared to the mean oil content in seed from transgenic Arabidopsis lines planted within 30 days of ME11273. As presented in Table 7, the oil content was increased to 129%, 120%, and 123% in seed from events −01, −02, and −05, respectively, compared to the population mean.

TABLE 7
Oil content (% control) in T₂ and T₃ seed from ME11273 events
containing Ceres CDNA ID no. 23649975

| | Event - | Event - | Event - | Event - | Event - | |
|---|---|---|---|---|---|---|
| | 01 | 02 | 03 | 04 | 05 | Control |
| Oil content | 129 | 120 | 102 | 115 | 123 | 100 ± 0* |
| (% control) | | | | | | |
| in T₂ seed | | | | | | |
| p-value | <0.01 | 0.04 | 0.47 | 0.13 | 0.02 | N/A |
| Oil content | 105 ± 0 | 105 ± 1 | 97 ± 1 | 104 ± 0 | 102 ± 1 | 100 ± 0 |
| (% control) | | | | | | |
| in T₃ seed | | | | | | |
| p-value | <0.01 | <0.01 | 0.03 | <0.01 | 0.19 | N/A |
| No. of | 3 | 5 | 5 | 3 | 3 | 15 |
| T₂ plants | | | | | | |

*Population mean of the oil content in seed from transgenic lines planted within 30 days of ME11273. Variation is presented as the standard error of the mean.

[0280] The oil content in T₃ seed from three events of ME11273 was significantly increased compared to the oil content in corresponding control seed. As presented in Table 7, the oil content was increased to 105% in seed from events −01 and −02 and to 104% in seed from event −04 compared to the oil content in control seed. The oil content in T₃ seed from one event of ME11273 was significantly decreased compared to the oil content in corresponding control seed. As presented in Table 7, the oil content was decreased to 97% in seed from event −03 compared to the oil content in control seed.

[0281] T₂ and T₃ seed from four events of ME11273 containing Ceres CDNA ID no. 23649975 was also analyzed for oleic acid content using GC-MS as described in Example 2. For each event, the area under the peak in the chromatogram corresponding to oleic acid was normalized to the internal standard, and the normalized peak areas were compared to those from empty vector transgenic controls processed and analyzed in a similar manner.

[0282] The oleic acid content in T₂ seed from two events of ME11273 was significantly increased compared to the mean oleic acid content in seed from empty vector transgenic Arabidopsis controls. As presented in Table 8, the oleic acid content was increased to 131% and 122% in seed from events −01 and −02, respectively, compared to controls. The oleic acid content in T₂ seed from two events of ME11273 was significantly decreased compared to the mean oleic acid content in seed from empty vector transgenic Arabidopsis controls. As presented in Table 8, the oleic acid content was decreased to 60% and 68% in seed from events −03 and −04, respectively, compared to controls.

TABLE 8
Oleic acid content (% control) in T₂ and T₃ seed from ME11273 events
containing Ceres CDNA ID no. 23649975

| | Event -01 | Event -02 | Event -03 | Event -04 | Control |
|---|---|---|---|---|---|
| Oleic acid | 131 ± 2 | 122 ± 1 | 60 ± 1 | 68 ± 1 | 100 ± 10 |
| content | | | | | |
| (% control) | | | | | |
| in T₂ seed | | | | | |
| p-value | 0.01 | <0.01 | <0.01 | <0.01 | N/A |
| Oleic acid | 130 ± 3 | 123 ± 4 | 101 ± 2 | 109 ± 3 | 100 ± 9 |
| content | | | | | |
| (% control) | | | | | |
| in T₃ seed | | | | | |
| p-value | <0.01 | 0.01 | 0.84 | 0.13 | N/A |
| No. of | 5 | 5 | 5 | 5 | 15 |
| T₂ plants | | | | | |

Variation is presented as the standard error of the mean.

[0283] The oleic acid content in T₃ seed from two events of ME11273 was significantly increased compared to the oleic acid content in corresponding control seed. As presented in Table 8, the oleic acid content was increased to 130% and 123% in seed from events −01 and −02, respectively, compared to the oleic acid content in corresponding control seed.

[0284] T₂ and T₃ seed from five events of ME11273 containing Ceres CDNA ID no. 23649975 was also analyzed for total protein content using FT-NIR spectroscopy as described in Example 3.

[0285] The protein content in T₂ seed from ME11273 events was not observed to differ significantly from the mean protein content in seed from transgenic Arabidopsis lines planted within 30 days of ME11273 (Table 9).

TABLE 9
Protein content (% control) in T₂ and T₃ seed from ME11273 events
containing Ceres CDNA ID no. 23649975

| | Event - | Event - | Event - | Event - | Event - | |
|---|---|---|---|---|---|---|
| | 01 | 02 | 03 | 04 | 05 | Control |
| Protein | 100 | 96 | 95 | 83 | 92 | 100 ± 0* |
| content | | | | | | |
| (% control) | | | | | | |
| in T₂ seed | | | | | | |
| p-value | 0.25 | 0.24 | 0.24 | 0.17 | 0.23 | N/A |
| Protein | 113 ± 0 | 104 ± 1 | 108 ± 1 | 106 ± 1 | 107 ± 2 | 100 ± 1 |
| content | | | | | | |
| (% control) | | | | | | |
| in T₃ seed | | | | | | |
| p-value | <0.01 | 0.01 | <0.01 | <0.01 | 0.04 | N/A |
| No. of | 3 | 5 | 5 | 3 | 3 | 15 |
| T₂ plants | | | | | | |

*Population mean of the protein content in seed from transgenic lines planted within 30 days of ME11273. Variation is presented as the standard error of the mean.

[0286] The protein content in T₃ seed from five events of ME11273 was significantly increased compared to the protein content in corresponding control seed. As presented in Table 9, the protein content was increased to 113%, 104%, 108%, 106%, and 107% in seed from events −01, −02, −03, −04, and −05, respectively, compared to the protein content in control seed.

[0287] The physical appearances of T₁ ME11273 plants were similar to those of corresponding control plants. There were no observable or statistically significant differences between T₂ ME11273 and control plants in germination, onset of flowering, rosette area, fertility, and general morphology/architecture.

### Example 8

### Results for ME03169 Events

[0288] T₂ and T₃ seed from four events and five events, respectively, of ME03169 containing Ceres CLONE ID no. 590462 was analyzed for oil content using FT-NIR spectroscopy as described in Example 2.

[0289] The oil content in T₂ seed from three events of ME03169 was significantly increased compared to the mean oil content in seed from transgenic Arabidopsis lines planted within 30 days of ME03169. As presented in Table 10, the oil content was increased to 125%, 118%, and 115% in seed from events −06, −07, and −09, respectively, compared to the population mean.

TABLE 10
Oil content (% control) in T₂ and T₃ seed from ME03169 events
containing Ceres CLONE ID no. 590462

| | Event - | Event - | Event - | Event - | Event - | |
|---|---|---|---|---|---|---|
| | 05 | 06 | 07 | 08 | 09 | Control |
| Oil content | 108 | 125 | 118 | No data | 115 | 100 ± 0* |
| (% control) | | | | | | |
| in T₂ seed | | | | | | |
| p-value | 0.25 | <0.01 | <0.01 | No data | 0.02 | N/A |
| Oil content | 103 ± 1 | 105 ± 0 | 103 ± 1 | 102 ± 2 | 105 ± 0 | 100 ± 1 |
| (% control) | | | | | | |
| in T₃ seed | | | | | | |
| p-value | 0.09 | <0.01 | 0.02 | 0.33 | <0.01 | N/A |
| No. of | 3 | 5 | 3 | 3 | 5 | 29 |
| T₂ plants | | | | | | |

*Population mean of the oil content in seed from transgenic lines planted within 30 days of ME03169. Variation is presented as the standard error of the mean.

[0290] The oil content in T₃ seed from three events of ME03169 was significantly increased compared to the oil content in corresponding control seed. As presented in Table 10, the oil content was increased to 105% in seed from events −06 and −09 and to 103% in seed from event −07 compared to the oil content in control seed.

[0291] T₂ and T₃ seed from four events and five events, respectively, of ME03169 containing Ceres CLONE ID no. 590462 was also analyzed for total protein content using FT-NIR spectroscopy as described in Example 3. The protein content in T₂ and T₃ seed from ME03169 events was not observed to differ significantly from the protein content in corresponding control seed (Table 11).

TABLE 11
Protein content (% control) in T₂ and T₃ seed from ME03169 events
containing Ceres CLONE ID no. 590462

| | Event - | Event - | Event - | Event - | Event - | |
|---|---|---|---|---|---|---|
| | 05 | 06 | 07 | 08 | 09 | Control |
| Protein | 94 | 105 | 109 | No data | 101 | 100 ± 0* |
| content | | | | | | |
| (% control) | | | | | | |
| in T₂ seed | | | | | | |
| p-value | 0.33 | 0.31 | 0.37 | No data | 0.21 | N/A |
| Protein | 99 ± 1 | 101 ± 2 | 100 ± 2 | 100 ± 2 | 101 ± 3 | 100 ± 1 |
| content | | | | | | |
| (% control) | | | | | | |
| in T₃ seed | | | | | | |
| p-value | 0.58 | 0.67 | 0.99 | 0.90 | 0.81 | N/A |
| No. of | 3 | 5 | 3 | 3 | 5 | 29 |
| T₂ plants | | | | | | |

*Population mean of the protein content in seed from transgenic lines planted within 30 days of ME03169. Variation is presented as the standard error of the mean.

[0292] The physical appearances of T₁ ME03169 plants were similar to those of corresponding control plants. There were no observable or statistically significant differences between T₂ ME03169 and control plants in germination, onset of flowering, rosette area, fertility, and general morphology/architecture. T₃ plants in one out of two pots from each of events −06 and −07 were observed to have curled rosette leaves and a smaller stature.

### Example 9

### Results for ME03180 Events

[0293] T₂ and T₃ seed from four events of ME03180 containing Ceres CLONE ID no. 625035 was analyzed for oil content using FT-NIR spectroscopy as described in Example 2.

[0294] The oil content in T₂ seed from two events of ME03180 was significantly increased compared to the mean oil content in seed from transgenic Arabidopsis lines planted within 30 days of ME03180. As presented in Table 12, the oil content was increased to 120% and 115% in seed from events −01 and −05, respectively, compared to the population mean.

TABLE 12
Oil content (% control) in T₂ and T₃ seed
from ME03180 events containing Ceres CLONE ID no. 625035

| | Event-01 | Event-02 | Event-03 | Event-05 | Control |
|---|---|---|---|---|---|
| Oil content | 120 | 106 | 99 | 115 | 100 ± 0* |
| (% control) | | | | | |
| in T₂ seed | | | | | |
| p-value | <0.01 | 0.38 | 0.63 | 0.02 | N/A |
| Oil content | 105 ± 1 | 100 ± 1 | 102 ± 1 | 103 ± 1 | 100 ± 1 |
| (% control) | | | | | |
| in T₃ seed | | | | | |
| p-value | <0.01 | 0.87 | 0.06 | 0.01 | N/A |
| No. of T₂ | 5 | 4 | 5 | 4 | 29 |
| plants | | | | | |

*Population mean of the oil content in seed from transgenic lines planted within 30 days of ME03180. Variation is presented as the standard error of the mean.

[0295] The oil content in T₃ seed from two events of ME03180 was significantly increased compared to the oil content in corresponding control seed. As presented in Table 12, the oil content was increased to 105% and 103% in seed from events −01 and −05, respectively, compared to the oil content in control seed.

[0296] T₂ and T₃ seed from four events of ME03180 containing Ceres CLONE ID no. 625035 was also analyzed for total protein content using FT-NIR spectroscopy as described in Example 3.

[0297] The protein content in T₂ seed from ME03180 events was not observed to differ significantly from the mean protein content in seed from transgenic Arabidopsis lines planted within 30 days of ME03180 (Table 13).

TABLE 13
Protein content (% control) in T₂ and T₃ seed
from ME03180 events containing Ceres CLONE ID no. 625035

| | Event-01 | Event-02 | Event-03 | Event-05 | Control |
|---|---|---|---|---|---|
| Protein | 111 | 97 | 99 | 106 | 100 ± 0* |
| content | | | | | |
| (% control) | | | | | |
| in T₂ seed | | | | | |
| p-value | 0.17 | 0.34 | 0.36 | 0.29 | N/A |
| Protein | 91 ± 1 | 94 ± 1 | 94 ± 1 | 99 ± 2 | 100 ± 1 |
| content | | | | | |
| (% control) | | | | | |
| in T₃ seed | | | | | |
| p-value | <0.01 | 0.03 | <0.01 | 0.59 | N/A |
| No. of | 5 | 4 | 5 | 4 | 29 |
| T₂ plants | | | | | |

*Population mean of the protein content in seed from transgenic lines planted within 30 days of ME03180. Variation is presented as the standard error of the mean.

[0298] The protein content in T₃ seed from three events of ME03180 was significantly decreased compared to the protein content in corresponding control seed. As presented in Table 13, the protein content was decreased to 91% in seed from event −01 and o 94% in seed from events −02 and −03 compared to the protein content in control seed.

[0299] The physical appearances of T₁ ME03180 plants were similar to those of corresponding control plants. There were no observable or statistically significant differences between T₂ ME03180 and control plants in germination, onset of flowering, rosette area, fertility, and general morphology/architecture.

### Example 10

### Results for ME05421 Events

[0300] T₂ and T₃ seed from four events and five events, respectively, of ME05421 containing Ceres CLONE ID no. 5344 was analyzed for oil content using FT-NIR spectroscopy as described in Example 2.

[0301] The oil content in T₂ seed from four events of ME05421 was significantly increased compared to the mean oil content in seed from transgenic Arabidopsis lines planted within 30 days of ME05421. As presented in Table 14, the oil content was increased to 114% in seed from events −01 and −05 and to 124% and 115% in seed from events −02 and −03, respectively, compared to the population mean.

TABLE 14
Oil content (% control) in T₂ and T₃ seed
from ME05421 events containing Ceres CLONE ID no. 5344

| | Event- | Event- | Event- | Event- | Event- | |
|---|---|---|---|---|---|---|
| | 01 | 02 | 03 | 04 | 05 | Control |
| Oil content | 114 | 124 | 115 | No data | 114 | 100 ± 0* |
| (% control) | | | | | | |
| in T_{2 seed} | | | | | | |
| p-value | 0.05 | <0.01 | 0.04 | No data | 0.05 | N/A |
| Oil content | 102 ± 2 | 103 ± 1 | 101 ± 2 | 102 ± 3 | 104 ± 0 | 100 ± 1 |
| (% control) | | | | | | |
| in T₃ seed | | | | | | |
| p-value | 0.32 | <0.01 | 0.61 | 0.18 | <0.01 | N/A |
| No. of | 5 | 5 | 5 | 3 | 4 | 29 |
| T₂ plants | | | | | | |

*Population mean of the oil content in seed from transgenic lines planted within 30 days of ME05421. Variation is presented as the standard error of the mean.

[0302] The oil content in T₃ seed from two events of ME05421 was significantly increased compared to the oil content in corresponding control seed. As presented in Table 14, the oil content was increased to 103% and 104% in seed from events −02 and −05, respectively, compared to the oil content in control seed.

[0303] T₂ and T₃ seed from four events and five events, respectively, of ME05421 containing Ceres CLONE ID no. 5344 was also analyzed for total protein content using FT-NIR spectroscopy as described in Example 3.

[0304] The protein content in T₂ seed from ME05421 events was not observed to differ significantly from the mean protein content in seed from transgenic Arabidopsis lines planted within 30 days of ME05421 (Table 15).

TABLE 15
Protein content (% control) in T₂ and T₃ seed
from ME05421 events containing Ceres CLONE ID no. 5344

| | Event- | Event- | Event- | Event- | Event- | |
|---|---|---|---|---|---|---|
| | 01 | 02 | 03 | 04 | 05 | Control |
| Protein | 89 | 92 | 102 | No data | 92 | 100 ± 0* |
| content | | | | | | |
| (% control) | | | | | | |
| in T₂ seed | | | | | | |
| p-value | 0.21 | 0.26 | 0.31 | No data | 0.25 | N/A |
| Protein | 86 ± 1 | 90 ± 2 | 89 ± 2 | 83 ± 1 | 83 ± 1 | 100 ± 1 |
| content | | | | | | |
| (% control) | | | | | | |
| in T₃ seed | | | | | | |
| p-value | <0.01 | <0.01 | <0.01 | <0.01 | <0.01 | N/A |
| No. of | 5 | 5 | 5 | 3 | 4 | 29 |
| T₂ plants | | | | | | |

*Population mean of the protein content in seed from transgenic lines planted within 30 days of ME05421. Variation is presented as the standard error of the mean.

[0305] The protein content in T₃ seed from five events of ME05421 was significantly decreased compared to the protein content in corresponding control seed. As presented in Table 15, the protein content was decreased to 86%, 90%, and 89% in seed from events −01, 02, and −03, respectively, and to 83% in seed from events −04 and −05 compared to the protein content in control seed.

[0306] The physical appearances of T₁ ME05421 plants were similar to those of corresponding control plants. There were no observable or statistically significant differences between T₂ ME05421 and control plants in germination, onset of flowering, rosette area, and general morphology/architecture. T₂ plants from event −05 of ME05421 had a decreased yield of seed relative to corresponding control plants.

### Example 11

### Results for ME03392 Events

[0307] T₂ and T₃ seed from five events and two events, respectively, of ME03392 containing Ceres CLONE ID no. 2721 was analyzed for oil content using FT-NIR spectroscopy as described in Example 2.

[0308] The oil content in T₂ seed from three events of ME03392 was significantly increased compared to the mean oil content in seed from transgenic Arabidopsis lines planted within 30 days of ME03392. As presented in Table 16, the oil content was increased to 123%, 115%, and 116% in seed from events −01, −02, and −04, respectively, compared to the population mean.

TABLE 16
Oil content (% control) in T₂ and T₃ seed from
ME03392 events containing Ceres CLONE ID no. 2721

| | Event- | Event- | Event- | Event- | Event- | |
|---|---|---|---|---|---|---|
| | 01 | 02 | 03 | 04 | 05 | Control |
| Oil content | 123 | 115 | 105 | 116 | 105 | 100 ± 0* |
| (% control) | | | | | | |
| in T₂ seed | | | | | | |
| p-value | <0.01 | 0.02 | 0.46 | 0.02 | 0.43 | N/A |
| Oil content | No data | 100 ± 2 | No data | 111 ± 1 | No data | 100 ± 1 |
| (% control) | | | | | | |
| in T₃ seed | | | | | | |
| p-value | No data | 0.95 | No data | <0.01 | No data | N/A |

*Population mean of the oil content in seed from transgenic lines planted within 30 days of ME03392. Variation is presented as the standard error of the mean.

[0309] The oil content in T₃ seed from one event of ME03392 was significantly increased compared to the oil content in corresponding control seed. As presented in Table 16, the oil content was increased to 111% in seed from event −04 compared to the oil content in control seed.

### Example 12

### Results for ME03531 Events

[0310] T₂ and T₃ seed from four events and two events, respectively, of ME03531 containing Ceres CLONE ID no. 37493 was analyzed for oil content using FT-NIR spectroscopy as described in Example 2.

[0311] The oil content in T₂ seed from two events of ME03531 was significantly increased compared to the mean oil content in seed from transgenic Arabidopsis lines planted within 30 days of ME03531. As presented in Table 17, the oil content was increased to 118% and 116% in seed from events −03 and −05, respectively, compared to the population mean.

TABLE 17
Oil content (% control) in T₂ and T₃ seed from
ME03531 events containing Ceres CLONE ID no. 37493

| | Event-02 | Event-03 | Event-05 | Event-08 | Control |
|---|---|---|---|---|---|
| Oil content | 112 | 118 | 116 | 104 | 100 ± 0* |
| (% control) | | | | | |
| in T₂ seed | | | | | |
| p-value | 0.09 | 0.01 | 0.02 | 0.52 | N/A |
| Oil content | No data | 114 | No data | 101 ± 2 | 100 ± 1 |
| (% control) | | | | | |
| in T₃ seed | | | | | |
| p-value | No data | <0.01 | No data | 0.35 | N/A |

*Population mean of the oil content in seed from transgenic lines planted within 30 days of ME03531. Variation is presented as the standard error of the mean.

[0312] The oil content in T₃ seed from one event of ME03531 was significantly increased compared to the oil content in corresponding control seed. As presented in Table 17, the oil content was increased to 114% in seed from event −03 compared to the oil content in control seed.

### Example 13

### Results for ME06302 Events

[0313] T₂ and T₃ seed from five events and four events, respectively, of ME06302 containing Ceres CLONE D no. 36334 was analyzed for oil content using FT-NIR spectroscopy as described in Example 2.

[0314] The oil content in T₂ seed from two events of ME06302 was significantly increased compared to the mean oil content in seed from transgenic Arabidopsis lines planted within 30 days of ME06302. As presented in Table 18, the oil content was increased to 114% and 117% in seed from events −02 and −07, respectively, compared to the population mean.

TABLE 18
Oil content (% control) in T₂ and T₃ seed from ME06302 events containing Ceres
CLONE ID no. 36334

| | Event- | Event- | Event- | Event- | Event- | Event- | |
|---|---|---|---|---|---|---|---|
| | 01 | 02 | 04 | 07 | 09 | 10 | Control |
| Oil content (% control) | No data | 114 | 105 | 117 | 111 | 103 | 100 ± 0* |
| in T₂ seed | | | | | | | |
| p-value | No data | 0.05 | 0.48 | 0.01 | 0.14 | 0.56 | N/A |
| Oil content (% control) | 105 | No data | 101 ± 2 | 107 ± 1 | No data | 99 ± 1 | 100 ± 1 |
| in T₃ seed | | | | | | | |
| p-value | 0.22 | No data | 0.64 | <0.01 | No data | 0.19 | N/A |

* Population mean of the oil content in seed from transgenic lines planted within 30 days of ME06302. Variation is presented as the standard error of the mean.

[0315] The oil content in T₃ seed from one event of ME06302 was significantly increased compared to the oil content in corresponding control seed. As presented in Table 18, the oil content was increased to 107% in seed from event −07 compared to the oil content in control seed.

### Example 14

### Results for ME11271 Events

[0316] T₂ and T₃ seed from five events of ME11271 containing Ceres ANNOT ID no. 841273 was analyzed for oil content using FT-NIR spectroscopy as described in Example 2.

[0317] The oil content in T₂ seed from four events of ME11271 was significantly increased compared to the mean oil content in seed from transgenic Arabidopsis lines planted within 30 days of ME11271. As presented in Table 19, the oil content was increased to 122% in seed from events −02, −04, and −05 and to 121% in seed from event −03 compared to the population mean.

TABLE 19
Oil content (% control) in T₂ and T₃ seed from
ME11271 events containing Ceres ANNOT ID no. 841273

| | Event- | Event- | Event- | Event- | Event- | |
|---|---|---|---|---|---|---|
| | 01 | 02 | 03 | 04 | 05 | Control |
| Oil content | 115 | 122 | 121 | 122 | 122 | 100 ± 0* |
| (% control) | | | | | | |
| in T₂ seed | | | | | | |
| p-value | 0.13 | 0.03 | 0.04 | 0.03 | 0.03 | N/A |
| Oil content | 100 ± 1 | 102 ± 2 | 101 ± 1 | 104 ± 1 | 99 ± 3 | 100 ± 2 |
| (% control) | | | | | | |
| in T₃ seed | | | | | | |
| p-value | 0.83 | 0.11 | 0.23 | <0.01 | 0.65 | N/A |

*Population mean of the oil content in seed from transgenic lines planted within 30 days of ME11271. Variation is presented as the standard error of the mean.

[0318] The oil content in T₃ seed from one event of ME11271 was significantly increased compared to the oil content in corresponding control seed. As presented in Table 19, the oil content was increased to 104% in seed from event −04 compared to the oil content in control seed.

### Example 15

### Results for ME11827 Events

[0319] T₂ and T₃ seed from five events of ME11827 containing Ceres ANNOT ID no. 564261 was analyzed for oil content using FT-NIR spectroscopy as described in Example 2.

[0320] The oil content in T₂ seed from three events of ME11827 was significantly increased compared to the mean oil content in seed from transgenic Arabidopsis lines planted within 30 days of ME11827. As presented in Table 20, the oil content was increased to 122% in seed from event −01 and to 123% in seed from events −04 and −05 compared to the population mean.

TABLE 20
Oil content (% control) in T₂ and T₃ seed from
ME11827 events containing Ceres ANNOT ID no. 564261

| | Event- | Event- | Event- | Event- | Event- | |
|---|---|---|---|---|---|---|
| | 01 | 02 | 03 | 04 | 05 | Control |
| Oil content | 122 | No data | 119 | 123 | 123 | 100 ± 0* |
| (% control) | | | | | | |
| in T₂ seed | | | | | | |
| p-value | 0.05 | No data | 0.08 | 0.04 | 0.03 | N/A |
| Oil content | 102 ± 2 | 101 ± 1 | 106 ± 2 | 104 ± 2 | 100 ± 2 | 100 ± 2 |
| (% control) | | | | | | |
| in T₃ seed | | | | | | |
| p-value | 0.12 | 0.27 | <0.01 | 0.01 | 0.72 | N/A |

*Population mean of the oil content in seed from transgenic lines planted within 30 days of ME11827. Variation is presented as the standard error of the mean.

[0321] The oil content in T₃ seed from two events of ME11827 was significantly increased compared to the oil content in corresponding control seed. As presented in Table 20, the oil content was increased to 106% and 104% in seed from events −03 and −04, respectively, compared to the oil content in control seed.

### Example 16

### Results for ME11836 Events

[0322] T₂ and T₃ seed from five events of ME11836 containing Ceres ANNOT ID no. 565548 was analyzed for oil content using FT-NIR spectroscopy as described in Example 2.

[0323] The oil content in T₂ seed from three events of ME11836 was significantly increased compared to the mean oil content in seed from transgenic Arabidopsis lines planted within 30 days of ME11836. As presented in Table 21, the oil content was increased to 125%, 126%, and 127% in seed from events −02, −03, and −04, respectively, compared to the population mean.

TABLE 21
Oil content (% control) in T₂ and T₃ seed from
ME11836 events containing Ceres ANNOT ID no. 565548

| | Event- | Event- | Event- | Event- | Event- | |
|---|---|---|---|---|---|---|
| | 01 | 02 | 03 | 04 | 05 | Control |
| Oil content | 117 | 125 | 126 | 127 | 116 | 100 ± 0* |
| (% control) | | | | | | |
| in T₂ seed | | | | | | |
| p-value | 0.11 | 0.03 | 0.02 | 0.01 | 0.13 | N/A |
| Oil content | 101 ± 2 | 99 ± 2 | No data | 106 ± 1 | 105 ± 1 | 100 ± 2 |
| (% control) | | | | | | |
| in T₃ seed | | | | | | |
| p-value | 0.68 | 0.24 | No data | <0.01 | <0.01 | N/A |

*Population mean of the oil content in seed from transgenic lines planted within 30 days of ME11836. Variation is presented as the standard error of the mean.

[0324] The oil content in T₃ seed from two events of ME11836 was significantly increased compared to the oil content in corresponding control seed. As presented in Table 21, the oil content was increased to 106% and 105% in seed from events −04 and −05, respectively, compared to the oil content in control seed.

### Example 17

### Results for ME11837 Events

[0325] T₂ and T₃ seed from five events of ME11837 containing Ceres ANNOT ID no. 549258 was analyzed for oil content using FT-NIR spectroscopy as described in Example 2.

[0326] The oil content in T₂ seed from three events of ME11837 was significantly increased compared to the mean oil content in seed from transgenic Arabidopsis lines planted within 30 days of ME11837. As presented in Table 22, the oil content was increased to 128%, 124%, and 127% in seed from events −01, −02, and −03, respectively, compared to the population mean.

TABLE 22
Oil content (% control) in T₂ and T₃ seed from
ME11837 events containing Ceres ANNOT ID no. 549258

| | Event- | Event- | Event- | Event- | Event- | |
|---|---|---|---|---|---|---|
| | 01 | 02 | 03 | 04 | 05 | Control |
| Oil content | 128 | 124 | 127 | 118 | 105 | 100 ± 0* |
| (% control) | | | | | | |
| in T₂ seed | | | | | | |
| p-value | 0.01 | 0.03 | 0.01 | 0.09 | 0.39 | N/A |
| Oil content | 99 ± 1 | 105 ± 2 | 99 ± 1 | No data | 101 ± 1 | 100 ± 2 |
| (% control) | | | | | | |
| in T₃ seed | | | | | | |
| p-value | 0.21 | 0.02 | 0.58 | No data | 0.37 | N/A |

*Population mean of the oil content in seed from transgenic lines planted within 30 days of ME11837. Variation is presented as the standard error of the mean.

[0327] The oil content in T₃ seed from one event of ME11837 was significantly increased compared to the oil content in corresponding control seed. As presented in Table 22, the oil content was increased to 105% in seed from event −02 compared to the oil content in control seed.

### Example 18

### Results for ME06741 Events

[0328] T₂ and T₃ seed from three events and five events, respectively, of ME06741 containing Ceres CLONE ID no. 30018 was analyzed for oil content using FT-NIR spectroscopy as described in Example 2.

[0329] The oil content in T₂ seed from one event of ME06741 was significantly increased compared to the mean oil content in seed from transgenic Arabidopsis lines planted within 30 days of ME06741. As presented in Table 23, the oil content was increased to 115% in seed from event −03 compared to the population mean.

TABLE 23
Oil content (% control) in T₂ and T₃ seed from
ME06741 events containing Ceres CLONE ID no. 30018

| | Event- | Event- | Event- | Event- | Event- | |
|---|---|---|---|---|---|---|
| | 01 | 02 | 03 | 04 | 05 | Control |
| Oil content | No data | No data | 115 | 112 | 113 | 100 ± 0* |
| (% control) | | | | | | |
| in T₂ seed | | | | | | |
| p-value | No data | No data | 0.03 | 0.08 | 0.06 | N/A |
| Oil content | 106 ± 4 | 99 ± 1 | 105 ± 1 | 99 ± 3 | 98 ± 2 | 100 ± 1 |
| (% control) | | | | | | |
| in T₃ seed | | | | | | |
| p-value | 0.02 | 0.40 | <0.01 | 0.64 | 0.04 | N/A |

*Population mean of the oil content in seed from transgenic lines planted within 30 days of ME06741. Variation is presented as the standard error of the mean.

[0330] The oil content in T₃ seed from two events of ME06741 was significantly increased compared to the oil content in corresponding control seed. As presented in Table 23, the oil content was increased to 106% and 105% in seed from events −01 and −03, respectively, compared to the oil content in control seed. The oil content in T₃ seed from one event of ME06741 was significantly decreased compared to the oil content in corresponding control seed. As presented in Table 23, the oil content was decreased to 98% in seed from event −05 compared to the oil content in control seed.

### Example 19

### Results for ME09515 Events

[0331] T₂ and T₃ seed from three events and five events, respectively, of ME09515 containing Ceres ANNOT ID no. 542494 was analyzed for oil content using FT-NIR spectroscopy as described in Example 2.

[0332] The oil content in T₂ seed from three events of ME09515 was significantly increased compared to the mean oil content in seed from transgenic Arabidopsis lines planted within 30 days of ME09515. As presented in Table 24, the oil content was increased to 117% in seed from events −02 and −03 and to 116% in seed from event −04 compared to the population mean.

TABLE 24
Oil content (% control) in T₂ and T₃ seed from
ME09515 events containing Ceres ANNOT ID no. 542494

| | Event- | Event- | Event- | Event- | Event- | |
|---|---|---|---|---|---|---|
| | 02 | 03 | 04 | 05 | 07 | Control |
| Oil content | 117 | 117 | 116 | 112 | 108 | 100 ± 0* |
| (% control) | | | | | | |
| in T₂ seed | | | | | | |
| p-value | 0.04 | 0.04 | 0.05 | 0.14 | 0.33 | N/A |
| Oil content | 102 ± 1 | 100 | 95 ± 1 | 98 ± 2 | No data | 100 ± 2 |
| (% control) | | | | | | |
| in T₃ seed | | | | | | |
| p-value | 0.01 | 2.52 | 0.01 | 0.14 | No data | N/A |

*Population mean of the oil content in seed from transgenic lines planted within 30 days of ME09515. Variation is presented as the standard error of the mean.

[0333] The oil content in T3 seed from one event of ME09515 was significantly increased compared to the oil content in corresponding control seed. As presented in Table 24, the oil content was increased to 102% in seed from event −02 compared to the oil content in control seed. The oil content in T₃ seed from one event of ME09515 was significantly decreased compared to the oil content in corresponding control seed. As presented in Table 24, the oil content was decreased to 95% in seed from event −04 compared to the oil content in control seed.

### Example 20

### Results for ME09762, ME00874, ME00819, ME07924, and ME08504

[0334] A nucleic acid referred to as Ceres CLONE ID no. 945519 was isolated from Brassica napus. Ceres CLONE ID no. 945519 (SEQ ID NO:283) is predicted to encode a 249 amino acid acetyltransferase polypeptide (SEQ ID NO:186) that is a homolog of the polypeptide set forth in SEQ ID NO:185.

[0335] The following is a list of nucleic acids that were isolated from Glycine max plants. Ceres CLONE ID no. 690176 (SEQ ID NO:303) is predicted to encode a 479 amino acid cytochrome p450 polypeptide (SEQ ID NO:230) that is a homolog of the polypeptide set forth in SEQ ID NO:229. Ceres CLONE ID no. 574698 (SEQ ID NO:304) is predicted to encode a 472 amino acid cytochrome p450 polypeptide (SEQ ID NO:233) that is also a homolog of the polypeptide set forth in SEQ ID NO:229. Ceres CLONE ID no. 571162 (SEQ ID NO:307) is predicted to encode a 333 amino acid polypeptide (SEQ ID NO:249) that is a homolog of the polypeptide set forth in SEQ ID NO:87.

[0336] Each isolated nucleic acid described above was cloned into a Ti plasmid vector, CRS 338, containing a phosphinothricin acetyltransferase gene which confers Finale™ resistance to transformed plants. Constructs were made using CRS 338 that contained Ceres CLONE ID no. 945519, Ceres CLONE ID no. 574698, or Ceres CLONE ID no. 571162, each operably linked to a CaMV 35S promoter. Constructs also were made using CRS 338 that contained Ceres CLONE ID no. 690176 or Ceres CLONE ID no. 574698, each operably linked to a p32449 promoter. Wild-type Arabidopsis plants were transformed separately with each construct. The transformation were performed essentially as described in Bechtold et al., C.R. Acad. Sci. Paris, 316:1194-1199 (1993).

[0337] Transgenic Arabidopsis lines containing Ceres CLONE ID no. 945519, Ceres CLONE ID no. 574698, or Ceres CLONE ID no. 571162 operably linked to a CaMV 35S promoter were designated ME09762, ME07924, or ME08504, respectively. Transgenic Arabidopsis lines containing Ceres CLONE I) no. 690176 or Ceres CLONE ID no. 574698 operably linked to a p32449 promoter were designated ME00874 or ME00819, respectively. The presence of each vector containing a DNA clone described above in the respective transgenic Arabidopsis line transformed with the vector was confirmed by Finale™ resistance, PCR amplification from green leaf tissue extract, and/or sequencing of PCR products. As controls, wild-type Arabidopsis plants were transformed with the empty vector CRS 338.

[0338] T₂ seed from four events of ME09762 containing Ceres CLONE ID no. 945519 was analyzed for oil content using FT-NIR spectroscopy as described in Example 2. The oil content in T₂ seed from two events of ME09762 was significantly increased compared to the mean oil content in seed from transgenic Arabidopsis lines planted within 30 days of ME09762. As presented in Table 25, the oil content was increased to 116% in seed from events −03 and −04 compared to the population mean.

TABLE 25
Oil content (% control) in T₂ seed from
ME09762 events containing Ceres CLONE ID no. 945519

| | Event-01 | Event-02 | Event-03 | Event-04 | Control |
|---|---|---|---|---|---|
| Oil content | 74 | 103 | 116 | 116 | 100 ± 0* |
| (% control) | | | | | |
| in T₂ seed | | | | | |
| p-value | <0.01 | 0.51 | 0.03 | 0.04 | N/A |

*Population mean of the oil content of seed from transgenic lines planted within 30 days of ME09762.

[0339] The oil content in T₂ seed from one event of ME09762 was significantly decreased compared to the mean oil content in seed from transgenic Arabidopsis lines planted within 30 days of ME09762. As presented in Table 25, the oil content was decreased to 74% in seed from event −01 compared to the population mean.

[0340] T₂ seed from four events of ME00874 containing Ceres CLONE ID no. 690176 also was analyzed for oil content using FT-NIR spectroscopy as described in Example 2. The oil content in T₂ seed from one event of ME00874 was significantly (p<0.08) decreased compared to the mean oil content in seed from transgenic Arabidopsis lines planted within 30 days of ME00874. As presented in Table 26, the oil content was decreased to 88% in seed from event −03 compared to the population mean.

TABLE 26
Oil content (% control) in T₂ seed
from ME00874 events containing Ceres CLONE ID no. 690176

| | Event-01 | Event-03 | Event-04 | Event-05 | Control |
|---|---|---|---|---|---|
| Oil content | 100 | 88 | 100 | 95 | 100 ± 0* |
| (% control) | | | | | |
| in T₂ seed | | | | | |
| p-value | 0.51 | 0.08 | 0.52 | 0.29 | N/A |

* Population mean of the oil content of seed from transgenic lines planted within 30 days of ME00874.

[0341] T₂ seed from one event of ME00819 containing Ceres CLONE ID no. 574698, two events of ME07924 containing Ceres CLONE ID no. 574698, and three events of ME08504 containing Ceres CLONE ID no. 571162 also was analyzed for oil content using FT-NIR spectroscopy as described in Example 2. The oil content in T₂ seed from event −03 of ME00819, events −01 and 10 of ME07924, and events −01, −03, and −04 of ME08504 was not observed to differ significantly from the mean oil content in seed from transgenic Arabidopsis lines planted within 30 days of ME00819, ME07924, and ME08504, respectively. These results are not conclusive, however, since the in planta sequences of the DNA clones used to generate the transgenic plants have not been sequenced, and expression of the encoded polypeptides has not been confirmed.

### Example 21

### Determination of Functional Homolog and/or Ortholog Sequences

[0342] A subject sequence was considered a functional homolog or ortholog of a query sequence if the subject and query sequences encoded proteins having a similar function and/or activity. A process known as Reciprocal BLAST (Rivera et al., Proc. Natl. Acad. Sci. USA, 95:6239-6244 (1998)) was used to identify potential functional homolog and/or ortholog sequences from databases consisting of all available public and proprietary peptide sequences, including NR from NCBI and peptide translations from Ceres clones.

[0343] Before starting a Reciprocal BLAST process, a specific query polypeptide was searched against all peptides from its source species using BLAST in order to identify polypeptides having BLAST sequence identity of 80% or greater to the query polypeptide and an alignment length of 85% or greater along the shorter sequence in the alignment. The query polypeptide and any of the aforementioned identified polypeptides were designated as a cluster.

[0344] The BLASTP version 2.0 program from Washington University at Saint Louis, Mo., USA was used to determine BLAST sequence identity and E-value. The BLASTP version 2.0 program includes the following parameters: 1) an E-value cutoff of 1.0e−5; 2) a word size of 5; and 3) the −postsw option. The BLAST sequence identity was calculated based on the alignment of the first BLAST HSP (High-scoring Segment Pairs) of the identified potential functional homolog and/or ortholog sequence with a specific query polypeptide. The number of identically matched residues in the BLAST HSP alignment was divided by the HSP length, and then multiplied by 100 to get the BLAST sequence identity. The HSP length typically included gaps in the alignment, but in some cases gaps were excluded.

[0345] The main Reciprocal BLAST process consists of two rounds of BLAST searches; forward search and reverse search. In the forward search step, a query polypeptide sequence, “polypeptide A,” from source species SA was BLASTed against all protein sequences from a species of interest. Top hits were determined using an E-value cutoff of 10⁻⁵ and a sequence identity cutoff of 35%. Among the top hits, the sequence having the lowest E-value was designated as the best hit, and considered a potential functional homolog or ortholog. Any other top hit that had a sequence identity of 80% or greater to the best hit or to the original query polypeptide was considered a potential functional homolog or ortholog as well. This process was repeated for all species of interest.

[0346] In the reverse search round, the top hits identified in the forward search from all species were BLASTed against all protein sequences from the source species SA. A top hit from the forward search that returned a polypeptide from the aforementioned cluster as its best hit was also considered as a potential functional homolog or ortholog.

[0347] Functional homologs and/or orthologs were identified by manual inspection of potential functional homolog and/or ortholog sequences. Representative functional homologs and/or orthologs for SEQ ID NO:82, SEQ ID NO:87, SEQ ID NO:148, SEQ ID NO:151, SEQ ID NO:162, SEQ ID NO:175, SEQ ID NO:185, SEQ ID NO:190, SEQ ID NO:198, SEQ ID NO:203, SEQ ID NO:216, SEQ ID NO:229, and SEQ ID NO:245 are shown in FIGS. 1-13, respectively. The percent identities of functional homologs and/or orthologs to SEQ ID NO:82, SEQ ID NO:87, SEQ ID NO:148, SEQ ID NO:151, SEQ ID NO:162, SEQ ID NO:175, SEQ ID NO:185, SEQ ID NO:190, SEQ ID NO:198, SEQ ID NO:203, SEQ ID NO:216, SEQ ID NO:229, and SEQ ID NO:245 are shown below in Tables 27-39, respectively. The BLAST sequence identities and E-values given in Table 27-39 were taken from the forward search round of the Reciprocal BLAST process.

TABLE 27
Percent identity to Ceres CLONE ID no. 625035 (SEQ ID NO: 82)

| | | SEQ | % | | HMM |
|---|---|---|---|---|---|
| | | ID | Iden- | | bit |
| Designation | Species | NO: | tity | e-value | score |
| Ceres CLONE | Glycine max | 82 | N/A | N/A | 571.3 |
| ID no. 625035 | | | | | |
| Public GI no. | Mesembryanthemum | 83 | 69.6 | 1.10E−53 | 689.1 |
| 32401273 | crystallinum | | | | |
| Public GI no. | Oryza sativa | 84 | 55 | 2.60E−36 | 708.5 |
| 14140141 | | | | | |
| Public GI no. | Oryza sativa subsp. | 85 | 55 | 2.60E−36 | 706.3 |
| 50911399 | japonica | | | | |
| Public GI ID | Mesembryanthemum | 341 | 71.4 | 1.70E−73 | 689.1 |
| no. 7528276 | crystallinum | | | | |
| Ceres CLONE | Gossypium hirsutum | 343 | 69.7 | 2.19E−69 | 654.7 |
| ID no. 1926437 | | | | | |

TABLE 28
Percent identity to Ceres CLONE ID no. 5344 (SEQ ID NO: 87)

| | | SEQ ID | % | | HMM bit |
|---|---|---|---|---|---|
| Designation | Species | NO: | Identity | e-value | score |
| Ceres CLONE ID | Arabidopsis thaliana | 87 | N/A | N/A | 817.1 |
| no. 5344 | | | | | |
| Public GI no. | Brassica napus | 88 | 82.7 | 2.29E−149 | 809.4 |
| 26094811 | | | | | |
| Ceres CLONE ID | Brassica napus | 89 | 82.7 | 2.29E−149 | 809.4 |
| no. 1301219 | | | | | |
| Ceres CLONE ID | Zea mays | 90 | 76.5 | 4.00E−136 | 774.7 |
| no. 1411115 | | | | | |
| Public GI no. | Citrus iyo | 91 | 69.5 | 3.29E−116 | 836.5 |
| 3337095 | | | | | |
| Public GI no. | Citrus unshiu | 92 | 69.5 | 5.40E−116 | 836 |
| 3337091 | | | | | |
| Public GI no. | Citrus sp. cv. | 93 | 69.5 | 2.89E−117 | 848.1 |
| 18148925 | sannumphung | | | | |
| Public GI no. | Citrus sp. cv. | 94 | 69.2 | 1.40E−115 | 833.8 |
| 3242641 | sannumphung | | | | |
| Public GI no. | Citrus sinensis | 95 | 69.2 | 1.80E−115 | 831.6 |
| 1617034 | | | | | |
| Public GI no. | Citrus jambhiri | 96 | 69.2 | 3.00E−115 | 830.4 |
| 3205177 | | | | | |
| Public GI no. | Citrus sp. cv. | 97 | 69.2 | 3.70E−117 | 847.5 |
| 18148376 | sannumphung | | | | |
| Public GI no. | Gossypium barbadense | 98 | 69 | 6.20E−115 | 818.7 |
| 33469566 | | | | | |
| Public GI no. | Citrus iyo | 99 | 68.9 | 3.79E−115 | 823 |
| 3337093 | | | | | |
| Public GI no. | Citrus sp. cv. | 100 | 68.9 | 2.00E−116 | 843.2 |
| 18148923 | sannumphung | | | | |
| Public GI no. | Fortunella margarita | 101 | 68.3 | 9.10E−114 | 825.3 |
| 3978580 | | | | | |
| Public GI no. | Poncirus trifoliata | 102 | 68.3 | 6.20E−115 | 832.2 |
| 3978578 | | | | | |
| Public GI no. | Citrus latipes | 103 | 68 | 3.79E−115 | 829.8 |
| 19110472 | | | | | |
| Public GI no. | Citrus hystrix | 104 | 68 | 2.69E−114 | 831.5 |
| 19110474 | | | | | |
| Public GI no. | Citrus aurantiifolia | 105 | 68 | 1.89E−113 | 827.9 |
| 19110478 | | | | | |
| Public GI no. | Citrus jambhiri | 106 | 67.9 | 6.20E−115 | 843.1 |
| 17221624 | | | | | |
| Public GI no. | Citrus jambhiri | 107 | 67.6 | 8.19E−113 | 823.2 |
| 3192102 | | | | | |
| Public GI no. | Citrus jambhiri | 108 | 67.6 | 2.09E−114 | 837.6 |
| 17221626 | | | | | |
| Public GI no. | Prunus persica | 109 | 67.4 | 6.90E−116 | 861.3 |
| 58379364 | | | | | |
| Public GI no. | Microcitrus sp. | 110 | 67.3 | 7.29E−112 | 821.8 |
| 19110476 | citruspark01 | | | | |
| Public GI no. | Actinidia deliciosa | 111 | 67.1 | 5.60E−114 | 823.2 |
| 1143381 | | | | | |
| Public GI no. | Prunus persica | 112 | 67.1 | 1.09E−115 | 860.8 |
| 34068091 | | | | | |
| Public GI no. | Prunus persica | 113 | 67.1 | 3.79E−115 | 852.4 |
| 58379362 | | | | | |
| Public GI no. | Prunus mume | 114 | 66.8 | 8.80E−116 | 856.7 |
| 54306529 | | | | | |
| Public GI no. | Prunus mume | 115 | 66.8 | 1.09E−115 | 856.3 |
| 58379372 | | | | | |
| Public GI no. | Eucalyptus grandis | 116 | 66.4 | 7.19E−105 | 745.1 |
| 6651282 | | | | | |
| Public GI no. | Prunus mahaleb | 117 | 65.9 | 4.39E−114 | 856 |
| 8778050 | | | | | |
| Public GI no. | Prunus americana | 118 | 65.9 | 1.20E−113 | 860.3 |
| 57868641 | | | | | |
| Public GI no. | Prunus salicina | 119 | 65.9 | 3.10E−113 | 854.1 |
| 76365455 | | | | | |
| Public GI no. | Pyrus pyrifolia | 120 | 65.7 | 1.49E−113 | 859.4 |
| 33087508 | | | | | |
| Public GI no. | Eucalyptus grandis | 121 | 65.7 | 1.00E−112 | 853.2 |
| 38234920 | | | | | |
| Public GI no. | Pyrus communis | 122 | 65.7 | 6.39E−113 | 856.4 |
| 33087506 | | | | | |
| Public GI no. | Prunus salicina | 123 | 65.6 | 6.39E−113 | 849.9 |
| 63099931 | | | | | |
| Public GI no. | Pyrus communis | 124 | 65.4 | 1.69E−112 | 851.3 |
| 33087512 | | | | | |
| Public GI no. | Pyrus hybrid cultivar | 125 | 65.4 | 5.69E−112 | 844.1 |
| 33087510 | | | | | |
| Public GI no. | Rubus idaeus | 126 | 65.2 | 2.99E−106 | 817.2 |
| 40732890 | | | | | |
| Public GI no. | Prunus armeniaca | 127 | 65 | 5.69E−112 | 846.2 |
| 2460188 | | | | | |
| Ceres ANNOT ID | Populus balsamifera | 129 | 64.9 | 5.29E−109 | 799 |
| no. 1534757 | subsp. trichocarpa | | | | |
| Public GI no. | Malus x domestica | 130 | 64.8 | 9.40E−112 | 851.6 |
| 1679733 | | | | | |
| Ceres ANNOT ID | Populus balsamifera | 132 | 64.3 | 7.10E−98 | 697.6 |
| no. 1481274 | subsp. trichocarpa | | | | |
| Public GI no. | Vitis vinifera | 133 | 64.1 | 1.09E−108 | 813.7 |
| 21667647 | | | | | |
| Ceres ANNOT ID | Populus balsamifera | 135 | 64.1 | 1.49E−106 | 755.1 |
| no. 1528311 | subsp. trichocarpa | | | | |
| Public GI no. | Lycopersicon | 136 | 64 | 9.99E−108 | 804.2 |
| 469457 | esculentum | | | | |
| Public GI no. | Vitis vinifera | 137 | 63.8 | 1.39E−108 | 798.9 |
| 13172312 | | | | | |
| Public GI no. | Cucumis melo | 138 | 63 | 2.20E−103 | 783.7 |
| 30984105 | | | | | |
| Ceres ANNOT ID | Populus balsamifera | 140 | 62.8 | 2.20E−94 | 668.4 |
| no. 1474878 | subsp. trichocarpa | | | | |
| Public GI no. | Daucus carota | 141 | 58.4 | 7.29E−89 | 716.4 |
| 20066308 | | | | | |
| Public GI no. | Antirrhinum majus | 142 | 56.7 | 3.29E−93 | 768.3 |
| 444011 | | | | | |
| Ceres CLONE ID | Triticum aestivum | 143 | 52.4 | 1.10E−78 | 678.7 |
| no. 784385 | | | | | |
| Public GI no. | Phaseolus vulgaris | 144 | 48.1 | 6.29E−74 | 649.5 |
| 55859509 | | | | | |
| Public GI no. | Phaseolus vulgaris | 145 | 47.3 | 2.50E−72 | 620 |
| 50871748 | | | | | |
| Public GI no. | Phaseolus vulgaris | 146 | 47.3 | 2.50E−72 | 620.3 |
| 55859507 | | | | | |
| Ceres CLONE ID | Glycine max | 249 | 61.6 | 1.4E−103 | 798.5 |
| no. 571162 | | | | | |
| Public GI ID no. | Gossypium barbadense | 344 | 69 | 7.79E−115 | 818.7 |
| 33469564 | | | | | |
| Ceres CLONE ID | Panicum virgatum | 346 | 47.1 | 5.60E−73 | 588.3 |
| no. 1820701 | | | | | |

TABLE 29
Percent identity to Ceres CDNA ID no. 23649975 (SEQ ID NO: 148)

| | | SEQ | | | HMM |
|---|---|---|---|---|---|
| | | ID | % | | bit |
| Designation | Species | NO: | Identity | e-value | score |
| Ceres CDNA ID | Arabidopsis | 148 | N/A | N/A | 473.9 |
| no. 23649975 | thaliana | | | | |
| Ceres CLONE | Brassica napus | 149 | 83 | 3.30E−61 | 468.6 |
| ID no. 948978 | | | | | |

TABLE 30
Percent identity to Ceres CDNA ID no. 12703936 (SEQ ID NO: 151)

| | | SEQ ID | % | e- | HMM bit |
|---|---|---|---|---|---|
| Designation | Species | NO: | Identity | value | score |
| Ceres CDNA ID no. | Arabidopsis thaliana | 151 | N/A | N/A | 477.3 |
| 12703936 | | | | | |
| Ceres ANNOT ID no. | Populus balsamifera | 153 | 74.5 | 9.80E−85 | 487.7 |
| 1488415 | subsp. trichocarpa | | | | |
| Ceres ANNOT ID no. | Populus balsamifera | 155 | 73.2 | 7.70E−85 | 458.2 |
| 1460393 | subsp. trichocarpa | | | | |
| Ceres CLONE ID no. | Glycine max | 156 | 68.8 | 5.99E−78 | 471.6 |
| 524650 | | | | | |
| Ceres CLONE ID no. | Zea mays | 157 | 68.4 | 5.40E−77 | 487.7 |
| 237720 | | | | | |
| Ceres CLONE ID no. | Zea mays | 158 | 68 | 4.90E−67 | 426.4 |
| 465517 | | | | | |
| Ceres CLONE ID no. | Triticum aestivum | 159 | 63.7 | 8.49E−63 | 428.4 |
| 703914 | | | | | |
| Public GI no. | Oryza sativa subsp. | 160 | 62.1 | 1.99E−63 | 442.2 |
| 50881429 | japonica | | | | |
| Ceres CLONE ID no. | Panicum virgatum | 348 | 72.4 | 3.10E−79 | 477.9 |
| 1817099 | | | | | |
| Ceres CLONE ID no. | Gossypium hirsutum | 350 | 71.9 | 1.70E−78 | 411.5 |
| 1808214 | | | | | |
| Ceres CLONE ID no. | Gossypium hirsutum | 352 | 70.9 | 3.70E−76 | 396.9 |
| 1870041 | | | | | |
| Public GI ID no. | Oryza sativa subsp. | 353 | 69.2 | 1.40E−78 | 483.6 |
| 108862961 | japonica | | | | |

TABLE 31
Percent identity to Ceres CDNA ID no. 12706677 (SEQ ID NO: 162)

| | | SEQ ID | % | e- | HMM bit |
|---|---|---|---|---|---|
| Designation | Species | NO: | Identity | value | score |
| Ceres CDNA ID no. | Arabidopsis thaliana | 162 | N/A | N/A | 431.4 |
| 12706677 | | | | | |
| Ceres CLONE ID no. | Brassica napus | 163 | 87.5 | 3.70E−78 | 440.8 |
| 952316 | | | | | |
| Ceres CLONE ID no. | Glycine max | 164 | 72.4 | 3.30E−61 | 438 |
| 649261 | | | | | |
| Ceres ANNOT ID no. | Populus balsamifera | 166 | 69.6 | 1.19E−58 | 433.3 |
| 1469350 | subsp. trichocarpa | | | | |
| Ceres ANNOT ID no. | Populus balsamifera | 168 | 68.75 | 6.19E−60 | 423.7 |
| 1488942 | subsp. trichocarpa | | | | |
| Ceres CLONE ID no. | Zea mays | 169 | 67.6 | 2.10E−52 | 420.4 |
| 234461 | | | | | |
| Ceres CLONE ID no. | Zea mays | 170 | 66.6 | 5.49E−52 | 415 |
| 217678 | | | | | |
| Ceres CLONE ID no. | Triticum aestivum | 171 | 65.2 | 6.29E−51 | 419.1 |
| 1327188 | | | | | |
| Ceres CLONE ID no. | Gossypium hirsutum | 355 | 75.1 | 3.09E−63 | 416.3 |
| 1831965 | | | | | |
| Ceres CLONE ID no. | Panicum virgatum | 357 | 67 | 6.60E−54 | 406.1 |
| 1770078 | | | | | |
| Ceres CLONE ID no. | Panicum virgatum | 359 | 65.2 | 2.19E−48 | 373.2 |
| 2008759 | | | | | |

TABLE 32
Percent identity to Ceres ANNOT ID no. 542494 (SEQ ID NO: 175)

| | | SEQ ID | % | e- | HMM bit |
|---|---|---|---|---|---|
| Designation | Species | NO: | Identity | value | score |
| Ceres ANNOT ID no. | Arabidopsis thaliana | 175 | N/A | N/A | 371.3 |
| 542494 | | | | | |
| Ceres CLONE ID no. | Zea mays | 176 | 89.1 | 1.19E−63 | 356.6 |
| 1369396 | | | | | |
| Ceres CLONE ID no. | Brassica napus | 177 | 85.4 | 1.70E−53 | 291.9 |
| 1102549 | | | | | |
| Ceres ANNOT ID no. | Populus balsamifera | 179 | 72.7 | 1.70E−53 | 370.3 |
| 1515577 | subsp. trichocarpa | | | | |
| Ceres CLONE ID no. | Glycine max | 180 | 70 | 6.10E−51 | 362.1 |
| 516401 | | | | | |
| Ceres CLONE ID no. | Triticum aestivum | 181 | 45.1 | 8.59E−29 | 347 |
| 618542 | | | | | |
| Public GI no. | Oryza sativa subsp. | 182 | 44.8 | 1.39E−26 | 348.7 |
| 50940451 | japonica | | | | |
| Ceres CLONE ID no. | Zea mays | 183 | 42.8 | 9.79E−28 | 330.2 |
| 305154 | | | | | |
| Ceres CLONE ID no. | Panicum virgatum | 309 | 44.3 | 2.89E−28 | 338.8 |
| 1779106 | | | | | |

TABLE 33
Percent identity to Ceres ANNOT ID no. 549258 (SEQ ID NO: 185)

| | | SEQ | | | HMM |
|---|---|---|---|---|---|
| | | ID | % | | bit |
| Designation | Species | NO: | Identity | e-value | score |
| Ceres ANNOT | Arabidopsis | 185 | N/A | N/A | 731.2 |
| ID no. 549258 | thaliana | | | | |
| Ceres CLONE | Brassica napus | 186 | 87.4 | 8.39E−109 | 703.1 |
| ID no. 945519 | | | | | |
| Public GI no. | Oryza sativa | 187 | 60.8 | 170E−55 | 798.4 |
| 50935585 | subsp. japonica | | | | |
| Public GI no. | Oryza sativa | 188 | 60.8 | 1.70E−55 | 798.4 |
| 51963354 | subsp. japonica | | | | |

TABLE 34
Percent identity to Ceres ANNOT ID no. 564261 (SEQ ID NO: 190)

| | | SEQ ID | % | | HMM bit |
|---|---|---|---|---|---|
| Designation | Species | NO: | Identity | e-value | score |
| Ceres ANNOT ID no. | Arabidopsis thaliana | 190 | N/A | N/A | 667.5 |
| 564261 | | | | | |
| Ceres CLONE ID no. | Brassica napus | 191 | 83.1 | 1.90E−104 | 649.9 |
| 947761 | | | | | |
| Ceres CLONE ID no. | Glycine max | 192 | 64.7 | 3.10E−72 | 607.9 |
| 680759 | | | | | |
| Public GI no. | Oryza sativa subsp. | 193 | 64.3 | 8.49E−61 | 643.4 |
| 77549263 | japonica | | | | |
| Ceres ANNOT ID no. | Populus balsamifera | 195 | 62.7 | 6.00E−76 | 658.1 |
| 1486789 | subsp. trichocarpa | | | | |
| Ceres CLONE ID no. | Zea mays | 196 | 61.3 | 1.90E−63 | 642.9 |
| 230678 | | | | | |
| Ceres CLONE ID no. | Musa acuminata | 311 | 65.8 | 8.69E−68 | 602 |
| 1715450 | | | | | |
| Ceres CLONE ID | Panicum virgatum | 313 | 62.6 | 4.59E−62 | 618.1 |
| no. 1763963 | | | | | |
| Ceres CLONE ID no. | Gossypium hirsutum | 315 | 62 | 6.90E−75 | 654 |
| 1849790 | | | | | |
| Ceres CLONE ID | Panicum virgatum | 317 | 60.6 | 2.49E−63 | 640.8 |
| no. 1795526 | | | | | |

TABLE 35
Percent identity to Ceres ANNOT ID no. 565548 (SEQ ID NO: 198)

| | | SEQ | | | HMM |
|---|---|---|---|---|---|
| | | ID | % | | bit |
| Designation | Species | NO: | Identity | e-value | score |
| Ceres ANNOT ID | Arabidopsis | 198 | N/A | N/A | 622.1 |
| no. 565548 | thaliana | | | | |
| Ceres CLONE ID | Brassica napus | 199 | 66.3 | 4.40E−57 | 559.4 |
| no. 976147 | | | | | |

TABLE 36
Percent identity to Ceres CLONE ID no. 2721 (SEQ ID NO: 203)

| | | SEQ | | | HMM |
|---|---|---|---|---|---|
| | | ID | % | | bit |
| Designation | Species | NO: | Identity | e-value | score |
| Ceres CLONE ID | Arabidopsis | 203 | N/A | N/A | 323.8 |
| no. 2721 | thaliana | | | | |
| Ceres CLONE ID | Brassica napus | 204 | 82.8 | 6.80E−52 | 307 |
| no. 871180 | | | | | |
| Ceres CLONE ID | Glycine max | 205 | 80.1 | 1.49E−40 | 212.4 |
| no. 1115650 | | | | | |
| Ceres CLONE ID | Panicum | 206 | 79.1 | 1.60E−25 | 278.8 |
| no. 1767185 | virgatum | | | | |
| Public GI no. | Spinacia | 207 | 79 | 1.39E−28 | 297.9 |
| 1617213 | oleracea | | | | |
| Ceres CLONE ID | Triticum | 208 | 78.6 | 1.50E−24 | 278.7 |
| no. 772741 | aestivum | | | | |
| Ceres CLONE ID | Panicum | 209 | 77.7 | 3.40E−25 | 268.5 |
| no. 1760834 | virgatum | | | | |
| Ceres CLONE ID | Panicum | 210 | 77.7 | 4.40E−25 | 266.6 |
| no. 1762311 | virgatum | | | | |
| Ceres CLONE ID | Brassica napus | 211 | 77.5 | 9.40E−39 | 174 |
| no. 1080241 | | | | | |
| Ceres CLONE ID | Brassica napus | 212 | 77.2 | 1.29E−41 | 248.7 |
| no. 960043 | | | | | |
| Ceres CLONE ID | Panicum | 213 | 76.3 | 9.10E−25 | 260.6 |
| no. 1782555 | virgatum | | | | |
| Ceres CLONE ID | Brassica napus | 214 | 76.1 | 2.40E−49 | 290.4 |
| no. 1036232 | | | | | |
| Public GI ID | Pisum sativum | 318 | 64.2 | 2.80E−32 | 315.9 |
| no. 1617206 | | | | | |
| Ceres CLONE ID | Gossypium | 320 | 63.1 | 2.40E−33 | 310.2 |
| no. 1808894 | hirsutum | | | | |
| Public GI ID no. | Nicotiana | 321 | 57.3 | 4.60E−30 | 317.6 |
| 1617197 | tabacum | | | | |

TABLE 37
Percent identity to Ceres CLONE ID no. 30018 (SEQ ID NO: 216)

| | | | | | HMM |
|---|---|---|---|---|---|
| | | SEQ ID | % | e- | bit |
| Designation | Species | NO: | Identity | value | score |
| Ceres CLONE ID no. | Arabidopsis thaliana | 216 | N/A | N/A | 176.1 |
| 30018 | | | | | |
| Ceres ANNOT ID no. | Populus balsamifera | 218 | 81.6 | 2.29E−26 | 168.8 |
| 1488347 | subsp. trichocarpa | | | | |
| Ceres ANNOT ID no. | Populus balsamifera | 220 | 76.3 | 9.10E−25 | 168.5 |
| 1513719 | subsp. trichocarpa | | | | |
| Public GI no. 633685 | Solanum tuberosum | 221 | 76.3 | 1.50E−24 | 164 |
| Ceres CLONE ID no. | Glycine max | 222 | 76 | 8.19E−24 | 168.7 |
| 853331 | | | | | |
| Ceres CLONE ID no. | Zea mays | 223 | 74.1 | 8.40E−22 | 168.3 |
| 208991 | | | | | |
| Ceres CLONE ID no. | Zea mays | 224 | 72.5 | 2.19E−21 | 169 |
| 336493 | | | | | |
| Ceres CLONE ID no. | Zea mays | 225 | 72.5 | 5.89E−21 | 160.9 |
| 1064967 | | | | | |
| Ceres CLONE ID no. | Triticum aestivum | 226 | 72.5 | 5.89E−21 | 160.9 |
| 639802 | | | | | |
| Public GI no. 4775284 | Chlorella protothecoides | 227 | 58.3 | 7.70E−12 | 132.2 |
| Ceres CLONE ID no. | Brassica napus | 323 | 92.3 | 2.59E−27 | 170.5 |
| 959117 | | | | | |
| Ceres CLONE ID no. | Brassica napus | 325 | 90.7 | 3.40E−27 | 169.2 |
| 1090391 | | | | | |
| Ceres CLONE ID no. | Brassica napus | 327 | 89.8 | 4.00E−24 | 165.2 |
| 1270157 | | | | | |
| Ceres CLONE ID no. | Gossypium hirsutum | 329 | 81.9 | 5.50E−27 | 173.1 |
| 1797853 | | | | | |
| Ceres CLONE ID no. | Papaver somniferum | 331 | 80.6 | 1.59E−20 | 163.9 |
| 1620853 | | | | | |
| Public GI ID no. | Medicago truncatula | 332 | 80.5 | 3.89E−26 | 173.6 |
| 92867670 | | | | | |
| Ceres CLONE ID no. | Panicum virgatum | 334 | 77.4 | 1.99E−22 | 172.8 |
| 1955598 | | | | | |
| Public GI ID no. | Solanum tuberosum | 335 | 76.3 | 1.89E−24 | 164 |
| 1174870 | | | | | |
| Ceres CLONE ID no. | Musa acuminata | 337 | 70.5 | 7.70E−21 | 159.5 |
| 1739308 | | | | | |

TABLE 38
Percent identity to Ceres CLONE ID no. 36334 (SEQ ID NO: 229)

| | | SEQ ID | % | | HMM bit |
|---|---|---|---|---|---|
| Designation | Species | NO: | Identity | e-value | score |
| Ceres CLONE ID no. | Arabidopsis thaliana | 229 | N/A | N/A | 1125 |
| 36334 | | | | | |
| Ceres CLONE ID no. | Glycine max | 230 | 79.1 | 0 | 1127 |
| 690176 | | | | | |
| Ceres ANNOT ID no. | Populus balsamifera | 232 | 79 | 2.09E−198 | 1132 |
| 1464715 | subsp. trichocarpa | | | | |
| Ceres CLONE ID no. | Glycine max | 233 | 78.1 | 0 | 1085 |
| 574698 | | | | | |
| Public GI no. 9587211 | Vigna radiata | 234 | 77.9 | 0 | 1124 |
| Ceres CLONE ID no. | Glycine max | 235 | 77.8 | 0 | 1093 |
| 718939 | | | | | |
| Ceres ANNOT ID no. | Populus balsamifera | 237 | 77.7 | 1.49E−197 | 1107 |
| 1511511 | subsp. trichocarpa | | | | |
| Public GI no. | Nicotiana tabacum | 238 | 75.4 | 0 | 1101 |
| 45260636 | | | | | |
| Public GI no. | Artemisia annua | 239 | 72 | 5.49E−176 | 1078 |
| 86279652 | | | | | |
| Public GI no. | Zinnia elegans | 240 | 70.7 | 1.10E−168 | 997.6 |
| 71834072 | | | | | |
| Public GI no. | Oryza sativa subsp. | 241 | 64 | 0 | 1069 |
| 60677685 | japonica | | | | |
| Ceres CLONE ID no. | Zea mays | 242 | 63.1 | 0 | 1046 |
| 339347 | | | | | |
| Public GI no. | Oryza sativa subsp. | 243 | 62.6 | 3.40E−144 | 1059 |
| 77548615 | japonica | | | | |
| Public GI ID no. | Citrus sinensis | 338 | 80.3 | 4.89E−200 | 1129.2 |
| 70609692 | | | | | |
| Ceres CLONE ID no. | Panicum virgatum | 340 | 62.1 | 7.19E−144 | 1064.1 |
| 1786280 | | | | | |

TABLE 39
Percent identity to Ceres CLONE ID no. 37493 (SEQ ID NO: 245)

| | | SEQ | | | HMM |
|---|---|---|---|---|---|
| | | ID | % | | bit |
| Designation | Species | NO: | Identity | e-value | score |
| Ceres CLONE | Arabidopsis | 245 | N/A | N/A | 1008 |
| ID no. 37493 | thaliana | | | | |
| Ceres ANNOT | Populus | 247 | 76.5 | 3.00E−156 | 1012 |
| ID no. 1494370 | balsamifera | | | | |
| | subsp. | | | | |
| | trichocarpa | | | | |
| Public GI no. | Oryza sativa | 248 | 65.5 | 8.49E−127 | 1035 |
| 50929439 | subsp. japonica | | | | |

### Example 22

### Generation of Hidden Markov Models

[0348] Hidden Markov Models (HMMs) were generated by the program HMMER 2.3.2 using groups of sequences as input that are homologous and/or orthologous to each of SEQ ID NO:80, SEQ ID NO:414, SEQ ID NO:82, SEQ ID NO:87, SEQ ID NO:148, SEQ ID NO:151, SEQ ID NO:162, SEQ ID NO:175, SEQ ID NO:185, SEQ ID NO:190, SEQ ID NO:198, SEQ ID NO:203, SEQ ID NO:216, SEQ ID NO:229, and SEQ ID NO:245. To generate each HMM, the default HMMER 2.3.2 program parameters configured for glocal alignments were used.

[0349] An HMM was generated using the following sequences as input: SEQ ID NO:80, SEQ ID NOs:415-418, SEQ ID NOs:420-431, SEQ ID NOs:433-434, SEQ ID NO:437, and SEQ ID NOs:439-441. The sequences are aligned in FIG. 14. When fitted to the HMM, the sequences had the HMM bit scores listed in Table 40. Other homologous and/or orthologous sequences include SEQ ID NO:419, SEQ ID NO:432, SEQ ID NOs:435-436, and SEQ ID NO:438. These sequences also were fitted to the HMM, and the HMM bit scores are listed in Table 40.

TABLE 40
HMM bit scores of sequences related to SEQ ID NO: 80

| | | SEQ ID | HMM bit |
|---|---|---|---|
| Designation | Species | NO: | score |
| Ceres CLONE ID no. 590462 | Artificial | 80 | 147.6 |
| | sequence | | |
| Public GI ID no. 114974_T | Artificial | 415 | 124.1 |
| | sequence | | |
| Public GI ID no. 92881003_T | Artificial | 416 | 131.4 |
| | sequence | | |
| Public GI ID no. 54290938_T | Artificial | 417 | 121.7 |
| | sequence | | |
| Public GI ID no. 16757966_T | Artificial | 418 | 129.9 |
| | sequence | | |
| Ceres ANNOT ID no. | Artificial | 419 | 126.8 |
| 1490788_T | sequence | | |
| Public GI ID no. 54401705_T | Artificial | 420 | 132.3 |
| | sequence | | |
| Ceres ANNOT ID no. | Artificial | 421 | 126.8 |
| 1437978_T | sequence | | |
| Public GI ID no. 6118076_T | Artificial | 422 | 141.3 |
| | sequence | | |
| Public GI ID no. 32400332_T | Artificial | 423 | 132.7 |
| | sequence | | |
| Public GI ID no. 110623260_T | Artificial | 424 | 129.8 |
| | sequence | | |
| Ceres CLONE ID no. | Artificial | 425 | 129.7 |
| 1777157_T | sequence | | |
| Ceres CLONE ID no. 732610_T | Artificial | 426 | 132.1 |
| | sequence | | |
| Ceres CLONE ID no. | Artificial | 427 | 114 |
| 1926430_T | sequence | | |
| Public GI ID no. 6840855_T | Artificial | 428 | 104.4 |
| | sequence | | |
| Ceres CLONE ID no. 327253_T | Artificial | 429 | 125.5 |
| | sequence | | |
| Public GI ID no. 249262_T | Artificial | 430 | 110.3 |
| | sequence | | |
| Public GI ID no. 28628597_T | Artificial | 431 | 112.4 |
| | sequence | | |
| Public GI ID no. 11034736_T | Artificial | 432 | 129.5 |
| | sequence | | |
| Public GI ID no. 127734_T | Artificial | 433 | 124.5 |
| | sequence | | |
| Public GI ID no. 17226270_T | Artificial | 434 | 133.8 |
| | sequence | | |
| Public GI ID no. 62131643_T | Artificial | 435 | 125.4 |
| | sequence | | |
| Public GI ID no. 56130951_T | Artificial | 436 | 125.6 |
| | sequence | | |
| Public GI ID no. 127733_T | Artificial | 437 | 123.5 |
| | sequence | | |
| Public GI ID no. 12621052_T | Artificial | 438 | 121.9 |
| | sequence | | |
| Public GI ID no. 71361195_T | Artificial | 439 | 128.6 |
| | sequence | | |
| Public GI ID no. 56112345_T | Artificial | 440 | 125.5 |
| | sequence | | |
| Public GI ID no. 11034734_T | Artificial | 441 | 133 |
| | sequence | | |

[0350] An HMM was generated using the following sequences as input: SEQ ID NO:414, SEQ ID NO:369, SEQ ID NO:373, SEQ ID NO:377, SEQ ID NO:379, SEQ ID NOs:381-382, SEQ ID NOs:384-390, SEQ ID NOs:392-395, SEQ ID NOs:398-401, SEQ ID NOs:403-409, and SEQ ID NO:412. The sequences are aligned in FIG. 15. When fitted to the , the sequences had the HMM bit scores listed in Table 41. Other homologous and/or orthologous sequences include SEQ ID NO:371, SEQ ID NO:375, SEQ ID NO:383, SEQ ID NO:391, SEQ ID NOs:396-397, SEQ ID NO:402, and SEQ ID NOs:410-411. These sequences also were fitted to the HMM, and the HMM bit scores are listed in Table 41.

TABLE 41
HMM bit scores of sequences related to SEQ ID NO: 414

| | | SEQ | HMM |
|---|---|---|---|
| | | ID | bit |
| Designation | Species | NO: | score |
| Ceres CLONE ID no. | Glycine max | 414 | 1206.1 |
| 590462_FL | | | |
| Ceres ANNOT ID no. | Populus balsamifera subsp. | 369 | 1318 |
| 1437978 | trichocarpa | | |
| Ceres ANNOT ID no. | Populus balsamifera subsp. | 371 | 1213.9 |
| 1490788 | trichocarpa | | |
| Ceres CLONE ID no. | Panicum virgatum | 373 | 1211.1 |
| 1777157 | | | |
| Ceres CLONE ID no. | Panicum virgatum | 375 | 1120.6 |
| 1792940 | | | |
| Ceres CLONE ID no. | Gossypium hirsutum | 377 | 1210.8 |
| 1926430 | | | |
| Ceres CLONE ID no. | Zea mays | 379 | 1176.8 |
| 327253 | | | |
| Ceres CLONE ID no. | Triticum aestivum | 381 | 1237.7 |
| 732610 | | | |
| Public GI ID no. | Raphanus sativus | 382 | 1255.8 |
| 11034734 | | | |
| Public GI ID no. | Raphanus sativus | 383 | 1272.3 |
| 11034736 | | | |
| Public GI ID no. | Camellia sinensis | 384 | 1258 |
| 110623260 | | | |
| Public GI ID no. 114974 | Trifolium repens | 385 | 1123.9 |
| Public GI ID no. | Prunus avium | 386 | 1297.4 |
| 1155255 | | | |
| Public GI ID no. | Brassica juncea | 387 | 1238.7 |
| 12621052 | | | |
| Public GI ID no. 127733 | Brassica napus | 388 | 1267.3 |
| Public GI ID no. 127734 | Sinapis alba | 389 | 1252.4 |
| Public GI ID no. | Prunus serotina | 390 | 1317.2 |
| 15778634 | | | |
| Public GI ID no. | Prunus serotina | 391 | 1348 |
| 16757966 | | | |
| Public GI ID no. | Lycopersicon esculentum | 392 | 1189.3 |
| 17226270 | | | |
| Public GI ID no. 249262 | Manihot esculenta | 393 | 1205.9 |
| Public GI ID no. | Hevea brasiliensis | 394 | 1231.4 |
| 28628597 | | | |
| Public GI ID no. | Camellia sinensis | 395 | 1285.1 |
| 32400332 | | | |
| Public GI ID no. | Brassica juncea | 396 | 1237.1 |
| 4033345 | | | |
| Public GI ID no. | Brassica napus | 397 | 1227.7 |
| 414103 | | | |
| Public GI ID no. | Oryza sativa subsp. japonica | 398 | 1310.9 |
| 54290938 | | | |
| Public GI ID no. | Dalbergia nigrescens | 399 | 1327.7 |
| 54401705 | | | |
| Public GI ID no. | Armoracia rusticana | 400 | 1224.9 |
| 56112345 | | | |
| Public GI ID no. | Brassica rapa subsp. | 401 | 1263.7 |
| 56130949 | pekinensis | | |
| Public GI ID no. | Brassica rapa subsp. | 402 | 1263.2 |
| 56130951 | pekinensis | | |
| Public GI ID no. | Rauvolfia serpentina | 403 | 1254.7 |
| 6103585 | | | |
| Public GI ID no. | Dalbergia cochinchinensis | 404 | 1322.3 |
| 6118076 | | | |
| Public GI ID no. | Brassica rapa var. | 405 | 1265.2 |
| 62131643 | parachinensis | | |
| Public GI ID no. | Catharanthus roseus | 406 | 1159.2 |
| 6840855 | | | |
| Public GI ID no. | Wasabia japonica | 407 | 1244.9 |
| 71361195 | | | |
| Public GI ID no. | Arabidopsis lyrata subsp. | 408 | 1112.2 |
| 74473455 | lyrata | | |
| Public GI ID no. | Oncidium cv. ‘Gower | 409 | 1136.6 |
| 84316715 | Ramsey’ | | |
| Public GI ID no. | Oncidium cv. ‘Gower | 410 | 1121.9 |
| 84316796 | Ramsey’ | | |
| Public GI ID no. | Oncidium cv. ‘Gower | 411 | 1136.5 |
| 84316817 | Ramsey’ | | |
| Public GI ID no. | Medicago truncatula | 412 | 1369.4 |
| 92881003 | | | |

[0351] An HMM was generated using the following sequences as input: SEQ ID NOs:82-84 and SEQ ID NO:343. The sequences are aligned in FIG. 1. When fitted to the HMM, the sequences had the HMM bit scores listed in Table 27. Other homologous and/or orthologous sequences also were fitted to the HMM, and these sequences are listed in Table 27 along with their corresponding HMM bit scores.

[0352] An HMM was generated using the following sequences as input: SEQ ID NOs:87-88, SEQ ID NOs:90-93, SEQ ID NOs:95-96, SEQ ID NO:98, SEQ ID NOs:101-106, SEQ ID NOs:109-112, SEQ ID NO:114, SEQ ID NO:117-122, SEQ ID NO:124, SEQ ID NOs:126-127, SEQ ID NOs:129-130, SEQ ID NO:133, SEQ ID NOs:136-138, SEQ ID NOs:141-144, and SEQ ID NO:249. The sequences are aligned in FIG. 2. When fitted to the HMM, the sequences had the HMM bit scores listed in Table 28. Other homologous and/or orthologous sequences also were fitted to the HMM, and these sequences are listed in Table 28 along with their corresponding HMM bit scores.

[0353] An HMM was generated using the following sequences as input: SEQ ID NO:360 and SEQ ID NO:149. The sequences are aligned in FIG. 3. When fitted to the HMM, SEQ ID NO:148 and SEQ ID NO:149 had the HMM bit scores listed in Table 29. SEQ ID NO:360 had an HMM bit score of 473.9 when fitted to the HMM.

[0354] An HMM was generated using the following sequences as input: SEQ ID NO:151, SEQ ID NO:153, SEQ ID NOs:156-157, and SEQ ID NOs:159-160. The sequences are aligned in FIG. 4. When fitted to the HMM, the sequences had the HMM bit scores listed in Table 30. Other homologous and/or orthologous sequences also were fitted to the HMM, and these sequences are listed in Table 30 along with their corresponding HMM bit scores.

[0355] An HMM was generated using the following sequences as input: SEQ ID NOs:162-164, SEQ ID NO:166, SEQ ID NO:169, and SEQ ID NO:171. The sequences are aligned in FIG. 5. When fitted to the HMM, the sequences had the HMM bit scores listed in Table 31. Other homologous and/or orthologous sequences also were fitted to the HMM, and these sequences are listed in Table 31 along with their corresponding HMM bit scores.

[0356] An HMM was generated using the following sequences as input: SEQ ID NOs:175-177, SEQ ID NO:179, and SEQ ID NOs:180-182. The sequences are aligned in FIG. 6. When fitted to the HMM, the sequences had the HMM bit scores listed in Table 32. Other homologous and/or orthologous sequences also were fitted to the HMM, and these sequences are listed in Table 32 along with their corresponding HMM bit scores.

[0357] An HMM was generated using the following sequences as input: SEQ ID NOs:185-187. The sequences are aligned in FIG. 7. When fitted to the HMM, the sequences had the HMM bit scores listed in Table 33. Another homologous and/or orthologous sequence, SEQ ID NO:188, also was fitted to the HMM, and the HMM bit score of this sequence is listed in Table 33.

[0358] An HMM was generated using the following sequences as input: SEQ ID NOs:190-193, SEQ ID NO:195, SEQ ID NO:196, SEQ ID NO:311, SEQ ID NO:315, and SEQ ID NO:317. The sequences are aligned in FIG. 8. When fitted to the HMM, the sequences had the HMM bit scores listed in Table 34. Another homologous and/or orthologous sequence, SEQ ID NO:313, also was fitted to the HMM, and the HMM bit score of this sequence is listed in Table 34.

[0359] An HMM was generated using the following sequences as input: SEQ ID NOs:198-199. The sequences are aligned in FIG. 9. When fitted to the HMM, the sequences had the HMM bit scores listed in Table 35.

[0360] An HMM was generated using the following sequences as input: SEQ ID NOs:203-204, SEQ ID NOs:206-208, SEQ ID NO:318, SEQ ID NO:320, and SEQ ID NO:321. The sequences are aligned in FIG. 10. When fitted to the HMM, the sequences had the HMM bit scores listed in Table 36. Other homologous and/or orthologous sequences also were fitted to the HMM, and these sequences are listed in Table 36 along with their corresponding HMM bit scores.

[0361] An HMM was generated using the following sequences as input: SEQ ID NO:216, SEQ ID NO:218, SEQ ID NOs:221-223, SEQ ID NOs:226-227, SEQ ID NO:323, SEQ ID NO:329, SEQ ID NOs:331-332, SEQ ID NOs:334-335, and SEQ ID NO:337. The sequences are aligned in FIG. 11. When fitted to the HMM, the sequences had the HMM bit scores listed in Table 37. Other homologous and/or orthologous sequences also were fitted to the HMM, and these sequences are listed in Table 37 along with their corresponding HMM bit scores.

[0362] An HMM was generated using the following sequences as input: SEQ ID NO:229, SEQ ID NO:230, SEQ ID NO:232, SEQ ID NO:234, SEQ ID NOs:238-239, SEQ ID NOs:241-242, SEQ ID NO:338, and SEQ ID NO:340. The sequences are aligned in FIG. 12. When fitted to the HMM, the sequences had the HMM bit scores listed in Table 38. Other homologous and/or orthologous sequences also were fitted to the HMM, and these sequences are listed in Table 38 along with their corresponding HMM bit scores.

[0363] An HMM was generated using the following sequences as input: SEQ ID NO:245 and SEQ ID NOs:247-248. The sequences are aligned in FIG. 13. When fitted to the HMM, the sequences had the HMM bit scores listed in Table 39.

### Other Embodiments

[0364] It is to be understood that while the invention has been described in conjunction with the detailed description thereof, the foregoing description is intended to illustrate and not limit the scope of the invention, which is defined by the scope of the appended claims. Other aspects, advantages, and modifications are within the scope of the following claims.

The application's sequence listing, which the Patent Office published only in electronic form, follows.

SEQUENCE LISTING (441 sequences)

SEQ ID NO: 1 - DNA, 1823 bp, Arabidopsis thaliana
  misc_feature: Ceres Promoter 21876
gtctcttaaaaaggatgaacaaacacgaaactggtggattatacaaatgtcgccttatacatatatcggttattggccaaaagagctattttaccttatggataatggtgctactatggttggagttggaggtgtagttcaggcttcaccttctggtttaagccctccaatgggtaatggtaaatttccggcaaaaggtcctttgagatcagccatgttttccaatgttgaggtcttatattccaagtatgagaaaggtaaaataaatgcgtttcctatagtggagttgctagatagtagtagatgttatgggctacgaattggtaagagagttcgattttggactagtccactcggatactttttcaattatggtggtcctggaggaatctcttgtggagtttgatatttgcgagtataatctttgaacttgtgtagattgtacccaaaaccgaaaacatatcctatataaatttcattatgagagtaaaattgtttgttttatgtatcatttctcaactgtgattgagttgactattgaaaacatatcttagataagtttcgttatgagagttaatgatgattgatgacatacacactcctttatgatggtgattcaacgttttggagaaaatttatttataatctctcataaattctccgttattagttgaataaaatcttaaatgtctcctttaaccatagcaaaccaacttaaaaatttagattttaaagttaagatggatattgtgattcaacgattaattatcgtaatgcatattgattatgtaaaataaaatctaactaccggaatttattcaataactccattgtgtgactgcatttaaatatatgttttatgtcccattaattaggctgtaatttcgatttatcaatttatatactagtattaatttaattccatagatttatcaaagccaactcatgacggctagggttttccgtcaccttttcgatcatcaagagagtttttttataaaaaaatttatacaattatacaatttcttaaccaaacaacacataattataagctatttaacatttcaaattgaaaaaaaaaatgtatgagaattttgtggatccatttttgtaattctttgttgggtaaattcacaaccaaaaaaatagaaaggcccaaaacgcgtaagggcaaattagtaaaagtagaaccacaaagagaaagcgaaaaccctagacacctcgtagctataagtaccctcgagtcgaccaggattagggtgcgctctcatatttctcacattttcgtagccgcaagactcctttcagattcttacttgcaggttagatattttctctctttagtgtctccgatcttcatcttcttatgattattgtagctgtttagggtttagattcttagttttagctctatattgactgtgattatcgcttattctttgctgttgttatactgcttttgattctctagctttagatccgtttactcgtcgatcaatattgttcctattgagtctgatgtataatcctctgattaattgatagcgtttagttttgatatcgtcttcgcatgttttttatcatgtcgatctgtatctgctctggttatagttgattctgatgtatttggttggtgatgttccttagatttgatatacctgttgtctcgtggtttgatatgatagctcaactggtgatatgtggttttgtttcagtggatctgtgtttgattatattgttgacgttttggttgttgtatggttgatggttgatgtatttttgttgattctgatgtttcgatttttgtttttgttttgacagct

SEQ ID NO: 2 - DNA, 1000 bp, Arabidopsis thaliana
  misc_feature: Ceres Promoter PT0668
atagagttttactatgcttttggaatctttcttctaatgtgccaactacagagaaatacatgtattaccactaggaatcggaccatatcatagatatcaggattagataactagttctcgtcgctatcacttcgcattaagttctagtaattgttaaagattctaattttttactaaacaaaaactaaatcaacatcaaatatgcaaagtgtgtgttgtccacacaagtgactcaaagtatacgcaggtgggattggaccatattattgcaaatcgtttccgaaccactcatatttctttttttctctcctttttttatccggagaattatggaaccacttcatttcaacttcaaaactaattttttggttcagtgatcaaatacaaaaaaaaaaaaaaagttatagatattaaatagaaaactattccaatcttaaaaatacaaatgaaaccataattttaatttatacaaaactatttaattagctaagggttgtcttaacgtttagaaaataaaaaattatgattgtctgtttaaaattacaatgaatgaataaaaaaaatatgcaatgaatgaaagaataaattttgtacatccgatagaatgagaaaatgaattttgtacaaaccactcaagaattcaaaacaattgtcaaagttttcttctcagccgtgtgtcctcctctcctagccgccacatctcacacactaatgctaaccacgcgatgtaaccgtaagcgctgagtttttgcatttcagatttcacttccaccaaacaaaactcgccacgtcatcaatacgaatcattccgtataaacgtctagattctttacagcctacaatgttctcttctttggtcggccattatttaacgctttgaacctaaatctagcccagccaacgaagaagacgaagcaaatccaaaccaaagttctccattttcgtagcttctttaagctttttcagtatcatagagacacttttttttttttgattagaa

SEQ ID NO: 3 - DNA, 1000 bp, Arabidopsis thaliana
  misc_feature: Ceres Promoter PT0535
ttagtgaaattatgacattaagtaaggttttcttagttagctaatgtatggctattcaattgttatgttaggctattttagttagtatatgaatttaggcagtctatgcaaatgatttcgttttcattttttcatatgtaaacatcaagatcaagtaacgccattcgagttgatattttttttttaaattagtgtgtgtaaattttggaccgcttatttgagtttgctaatgaagttgcatatatattacgttaaaccataggcaaactaatttgaaacatccgattcgatttcctgtaatttttcttggttaattgaccaaaatcaagatcttcagaaataaaataaaagacgaaagaaagctgtcgcaaagcagattgtgttaaaaaaaagtggattgggctcaaacgcaacttgtccagcccgtgacaattaccctatacgcaagtaagagtaacgtatcactggcaaaagttggtattagttacgatatctttgtcatgggggcatgcatgggcatggcttaagagttaagccttaagaagagtcccacactcgtgactctcatgatcacttgttgtttcttacgggcaaatacatttaactttattcttcatttattcacctatattcttttggataataacttttctctatataaaataacaaacatcgtacgtttcatttatttacaacaagcgatgagaattaaaaggagaccttaattgatgatactcttcttttctctcggttacaacgggattattacagataatgataatctatatggatgctgacgtggaaaaacaaaatttggtgaaacacgtcaattaagcacgacttttccatggctagtggctaagatcgtttcatcacatggctatatcatataatacttggatgaattcaaaataaacgactgagaaaatgtccacgtcacggcgcaccgctttggacttaagtctcctataataaatacaacaccaaacattgcattcca

SEQ ID NO: 4 - DNA, 999 bp, Arabidopsis thaliana
  misc_feature: Ceres Promoter PT0585
tgaagtcatttaatatgagtttgacattaggtaaacctaatctatgagattatagaatgtagcaaaactatcaatgtttcttttccaaaatattttgtggtttttctttttggttcattatgttttgttatttgtgaattattttaatatgaagtaattatattgattttatatgatatacatattattttgatataaaatttaacacttatccattaaaatagcatgggcataatcaaaatcgggactattacgatgaaaaagatagttaaattgtatgataaaataaaatgtgtaagattaaaattttgggttttagaaaattactaaacaaaatatagacaaagtatgttgactattatttaaaatttaaatatcatcaataagatatagttaaagtcattaagtgtatagcaaaatgaaaattctaagattaaaattcgattaaaattttttttactaaattaaatatttaaaaatagggattatcatttactatttacaattctaatatcatgggtaaaaattgataactttttttaaacccgcctatctaggtgggcctaacctagtttactaattactatatgattaacttattaccacttttacttcttcttttttggtcaaattactttattgttttttataaagtcaaattactctttgcattgtaaataatagtagtaactaaaatcttaaaacaaaatattcaacctttcccattattggaatggtaatgtcttcaacaccattgaccaacgttaaggaatgtcttttaatatttttggaacctaaatgctaatactgtataccacaatcacttatgagtattgaagttgagatagaggaggtacaaggagaccttatctgcagaagacaaaaagccatttttagcaaaactaaagaaagaaaaaagattgaaacacaaatatgcgccactcgtagtccacccctatctctttggcaaaagccacttcactctttttccctttttat

SEQ ID NO: 5 - DNA, 1000 bp, Arabidopsis thaliana
  misc_feature: Ceres Promoter PT0613
ttaatactaacattgtagaaagccacaaaaaagaaattgaaatgtgagtagatgctgagtcagaggtttggtcaatacacaacagctaattgagataatattatacacgtcacgatgacttgttttttctcctcccaacttgttaatttctttattcttaaaattaaaccatcgcaaaaacagaagaacacagctgtttttctcgactcccaatttctattttgctgctaaggacatttcatttcattatttcccaattcaggactccttagattttcctaaatttgttttcctaacttgctctctctcattctaacattttctcatttttttagattatcttgtactttttagtagattattttatcaggttttacaaacatacattgacattctaaaaagggcttctaaaaattcagtgtggaatgctgatatactaaaaaaaggtcatgcaaaattatctacgatttatctaaaattagataatttgccatatataactattaactaataatcgatcctttgattttttgtttagataaaacgaaacagctatatcttttttttttgttatcggattttaatcgaataaaagctgaaaaataacagttatatcttcttcttttttaactaatgaaacagttatatcttaaacaaacaacagaaacagtaaaatattaatgcaaatccgcgtcaagagataaattttaacaaactaataacaattgagataagattagcgcaaaagaaactctaattttagagcgtgtaaacacaaacacgtcttgaaagtaaacgtgaattacacgcttctaaaacgagcgtgagttttggttataacgaagatacggtgaagtgtgacacctttctacgttaatttcagtttgaggacacaactcaagttatgtttgatatctaaggacttgcactgtctccaaatctgcaggaaggactttttgattggatcaatataaataccatctccattctcgtctccttc

SEQ ID NO: 6 - DNA, 351 bp, Arabidopsis thaliana
  misc_feature: Ceres Promoter PT0625
gatcatgatcagtttcaactcgctgtgcccacgtgtcgagagatcggcacgtgcctgagctctcagccgctcataaatacacttgtttagtagcaacagtatactatagtagtcctctcctgtttggcttttagcttgcatcgatggatggatggatggatcgcatgagagggcttcgcgaaggtacggaaccttacacaacgcgtgtcctttctacgtggccatcgtgtaggcgtctcgccatgctacgtgtcccggaggatgtctcgatgccaacccttataaatactgttccattccaatcccatcgccacagccagtgcaaatctgatcgatcaagataatcgagca

SEQ ID NO: 7 - DNA, 1022 bp, Arabidopsis thaliana
  misc_feature: Ceres Promoter PT0633
cccgatcggccttaatctgagtcctaaaaactgttatacttaacagttaacgcatgatttgatggaggagccatagatgcaattcaatcaaactgaaatttctgcaagaatctcaaacacggagatctcaaagtttgaaagaaaatttatttcttcgactcaaaacaaacttacgaaatttaggtagaacttatatacattatattgtaattttttgtaacaaaatgtttttattattattatagaattttactggttaaattaaaaatgaatagaaaaggtgaattaagaggagagaggaggtaaacattttcttctattttttcatattttcaggataaattattgtaaaagtttacaagatttccatttgactagtgtaaatgaggaatattctctagtaagatcattatttcatctacttcttttatcttctaccagtagaggaataaacaatatttagctcctttgtaaatacaaattaattttcgttcttgacatcattcaattttaattttacgtataaaataaaagatcatacctattagaacgattaaggagaaatacaattcgaatgagaaggatgtgccgtttgttataataaacagccacacgacgtaaacgtaaaatgaccacatgatgggccaatagacatggaccgactactaataatagtaagttacattttaggatggaataaatatcataccgacatcagtttgaaagaaaagggaaaaaaagaaaaaataaataaaagatatactaccgacatgagttccaaaaagcaaaaaaaaagatcaagccgacacagacacgcgtagagagcaaaatgactttgacgtcacaccacgaaaacagacgcttcatacgtgtccctttatctctctcagtctctctataaacttagtgagaccctcctctgttttactcacaaatatgcaaactagaaaacaatcatcaggaataaagggtttgattacttctattggaaagaaaaaaatctttggaaaaggcctgcaggg

SEQ ID NO: 8 - DNA, 1000 bp, Arabidopsis thaliana
  misc_feature: Ceres Promoter PT0650
catacttaattctaaaaaaacaacacttatagtttataagcagctcttatgataaaaatctttctgagttatagctctgttaaacttgtattcaccccaaaaacggatgtttcatttcttattttttacttggagtattttattgtaatttgtaaaaaaaaatgtaaagtgggggatatcatgaaaaacaacgtcactttgtttggtcacaatatacatttgataaaataatggtcgtcgcgtgatttagttgatttttgttttatcaaccacgtgtttcacttgatgagtagtttatatagttaacatgattcggccacttcagatttgggtttgcccacatatgacataccgacatagaaggttaaatccacgtgggaaatgccaatattcaatgtttggttttcaaaagagaatcatttctttatatgatctcaaaagtatggaattgaaatgactaatgagcacatgcaattggtgctatcttaaaaaccgaacgtctttgaatttaatttgtttttcaccaaaggtacctaatgaaaccctttcattaaaaaataaaggtaacaaacaaaattttgtattggaaaaaacattttttggaatatataatttggtaatagaattatgagcaaaaaagaaaaagaaaagaaagaataatgagcataataaagcctttacagtattactaattgggccgagcagttttgggctcttgatcatgtctagtaatcttaaacagacgataaagttaactgcaatttagttggttcaggtgagctaccaaatccaaaaatacgcagattaggttcaccgtaccggaacaaaccggatttatcaaaatccttaagttatacgaaatcacgcttttccttcgatttctccgctcttctccactcttcttctctgttctatcgcagacatttttgtttatatgcatacataataataatacactcttgtcaggatttttgattctctctttggttttctcggaaaa

SEQ ID NO: 9 - DNA, 998 bp, Arabidopsis thaliana
  misc_feature: Ceres Promoter PT0660
caagtcaagttccaatattctaaggagaaataatagtatactaaacatacattagagaggttaaacttctttttggatttaagtgtgtatgcataggctatttattcttaagtataactattaactgtagctagatttatacaagaaatacataaaactttatgcatgtgaggtagccatgaatatacgtacatgttgcaatcgattatacatgttgtatttggatttctctatacatgttttaacttgtcattctctaagtatatacataccattaatactgtgggcatgagtttatgataagacttttcttttggagaccagttttgttttcctttccacctatatttgtctataggcttcacggtacactagtttacaagtgtttttatatgttctaaataaaattgagattttccggaacggtatgatctgtttgcaaataaggacgtatatataacagtatcaaatatatttgttgttataaggcaataatatattttctgagatattgcgtgttacaaaaaagaaatatttgttaagaaaaaaaaagatggtcgaaaaaggggagtaggtgggggcggtcggcttttgattagtaataaaagaaaccacacgagtgacctaccgattcgactcaacgagtctaccgagctaacacagattcaactcgctcgagcttcgttttatgacaagttggtttttttttttttttttaattttttcatcttcttgggtttggttgggtcactcttcaggtcaggtgtgtaaaaaagaaagaaagaaaagagagattgttgtgttgtaacccctttgactaaaatctaatgaacttttttaacacaacaaaactccttcagatctgaaagggttcttcttctctcttagtctcttcgtccttttattctccgtcgtcgtttcatgatctgactctctggtcttctcttcttcttcttcttcttctattttttcttacttcgtcactgttgtgtctgaac

SEQ ID NO: 10 - DNA, 1000 bp, Arabidopsis thaliana
  misc_feature: Ceres Promoter PT0665
aaaaaggatgggtaatgggacctattttccccaacatcccacatgcacacttccctctccattctctcacatttatttctttcattctaatttatccattccgtgtgtaacatattcactaataatctcatctcactaactcattcattgattgtgatatgtttatctagaattagtgttttaacactgtgtctacatatgatttccttttcattgtatgtgaacatgttaactcactaatcattttgtattttcgagttaacatgagtctccacttcggtagactaaagtaaagataggtttgagtataataaagtttaaaatttgctttaaaatcaatatttataaataagtttttatcataagtgatttttgtatgttatattggaccttgtataaacagactacagaagaaaattatttatgagaacttgtaatgttagagtggacctcgtataaactaattatgtgggcttttaccataaactatttatgaaaattattatggcccacaccactataactaaagcccacatatttagcagcccagtttcattgtaagagacatgttcgctctggaactagaattttctggtttttgggtatttgttttcttatgtgtagagaaatgatggtaacgattaaatgttgtgtattacaatttacaatggtaagacgattaatatatttacacacaattttgttgttgctgtaacacgttagtgtgtgtgatgatagaatttcataaagctttaactacgaggggcaaaatgttaattctaaatagttgacagcagaaaaagatatgtatacataatataaggattaaaacgtaaataataataaataaggcgagttaaattaaaaccctgttaaaaccctagcttgaaacacatgtataaaaacacttgcgagcgcagcttcatcgccatcgccattctctctctcatcaaaagcttttctccttgattttcgcattctttagagtcttaacgcaaag

SEQ ID NO: 11 - DNA, 999 bp, Arabidopsis thaliana
  misc_feature: Ceres Promoter PT0672
cagccgtaaatcctccataaatttattttgcaagttttgctcattatataatgagcggaatttatgatataatcgtttgtaataatgttatgttttgatcaaaatttgaaattaaaagtaggtgagaacttgttatacagtgtagataaggtggatcttgaatataaaaataaaatttataagatgtatttaaagcagaaaagcataaaactttagataaaataatgtaaaaatgtgttagcatcaatgttgggatattggccgacccgaacttaatcaatgtcggaagccattacttctctcccaaaagacctttttccttcggagaactaggaacttcctcactacctttcgcttaacgtgaaagccataaatttcatatattcataaaaatcagaaaatctaaaactgtttagtatcacctgtttttggtatagactattggttttgtgttacttcctaaactatatgatttcgtacttcattggatcttatagagatgaatattcgtaaaaagataagttatctggtgaaacgttacttcagtcatgttgggtctagatttacatactactatgaaacattttaagataataattatcctagccaactatatgttctatattatgggccaagaagatatagaactaaaagttcagaatttaacgatataaattactagtatattctaatacttgaatgattactgttttagttgtttagaataaatagtagcgtgttggttaagataccatctatccacatctatatttgtgtgggttacataaaatgtacataatattatatacatatatatgtatatttttgataaagccatatattactccttgacctctgcccccatttccttttactataaataggaatactcatgatcctctaattcagcaatcaacaccaacgaacacaaccttttccaaagccaataataaaagaacaaaagcttttagtttcatcaaagacgaagctgccttagaa

SEQ ID NO: 12 - DNA, 1000 bp, Arabidopsis thaliana
  misc_feature: Ceres Promoter PT0676
aagatagtacagtttcagtgttttgagaaaaaaagctgaactaaaactaaaatgtttaaggacacaatatttagtttcaattagataattcaacagtttgaacaattttttttttttttttttgaagtcatttatttatacaatgttttaaaacgcattaagcatttaggcagccgacaaacgcctattgtctaactgtaaataggcgcttccacttaggttcatattgcatatttactatatgtgtatagtgacaaaaaccaatatttctcttattttggatgaaggtatagtagttgttaaatgttcaatataattaagcattaatgacaaataaaataaaattaatttagttgataaaaagataatcttataaaaagatcgatgaatagatataatggtttactgaattctatagctcttaccttgcacgactatgtcccaaggagaggaagtaccttaactataattctgaacataattttgtctatcttggtgagtattatatgacctaaaccctttaataagaaaaagtataatactggcgtaacgtaataaattaacacaatcataagttgttgacaagcaaaaaaacatacataatttgtttaatgagatatattagttatagttcttatgtcaaagtacaattatgcctaccaaaattaattaatgatttcaacaggaagtctgagatgatgggccgacgtgtagttacgtttcttgaattgtgagagatggtatttattatactgaagaaaacattatttactaaataaattttcatttcacatcttctgtaatcaatgcgggtagatgaagaagttgttaatacgatggccaaccatatggatctcttttttggcgtttctatatatagtaacctcgactccaaaggcattacgtgactcaataaaatcaagtcttttgtttccttttatccaaaaaaaaaaaaaagtcttgtgtttctcttaggttggttgagaatcatttcatttca

SEQ ID NO: 13 - DNA, 998 bp, Arabidopsis thaliana
  misc_feature: Ceres Promoter PT0678
aattaaatgaaaccgcccctaaattaggagggatttgggtaagtggtaacacattcactggaaacatgtgaagaaaggaggatgtcaagtagctgaaaactcagtatagtaaccaacggcttctcaccaacctttcattaataatttggtcatccctatatttttattcaacattttgtttttcaatagcttagagcaccttaatacctttcagtgtttttttataaaaaaaacaaaaattgggattaatcatcaatccccaaatgtaacgtttacttagattatgttcatttttctatacacacaaatcatattcttttgttttaatcttcgaaaaacgagaggacattaaatacccctaaaaaaggaggggacattactaccaacgtacattaacatgtttgatagcaaacgatttattttgttcgttttgaaaaggggaaagtaatgtgtaaattatgtaaagattaataaacttttatggtatagtaacattttcgaataataagagagggaaaacactcgccattgtcggcaatttagaaccaatattagaagggtttttttagagaaaaaggacttaaaagtttagagaccttaacaacaacttatttagaaatagacatgcttaagttgacaacagcgagtttattttctatatcgaagaaaaatacgaactttttcttaattagatttcgaatgcatgcactatcgagaatcgaccgtcacaagaaaaaactaatatacatactgtacatatctatattcaatattggtggggatgggtttaatgtgtatttataattcatggataaattcacacaataaggtccatgaaactagaaggtaccaaaaataagcattaatgactctttgccacttatatatatgattctctcatagtaccattttattctcccaaacctatcttcttcttcctctcttgtctctctcgctctctctcttctacattgtttcttgaggtcaatctattaaaa

SEQ ID NO: 14 - DNA, 1000 bp, Arabidopsis thaliana
  misc_feature: Ceres Promoter PT0683
gattgaatgatgagtgtgcacccttgtattactaataaaaaatttagcaacagttataagctaacgtcatccatgagtcattcattagattcactatttgcgttctcaaaaatcgaattgttaaaatttgagaagctctaatatacgagtcaatgagatgtggcaaaagcatgtccttgaccataaaatttcgaggggtcaactcattagataaggacaagaatcaaccaattgaaggcgtcttctataacaagtttctttattactaatattaaagtccaatggggtgagggggagaagaacttaaataaaaggaaataattggtaagtgaataaaatctaaatacgatactagatgattgatttgtgctagtgcatggtattagatcagatatgtgttactattcgaattcaaattggcatattccatgttgttgataagaaaattgtagaagtgtaaaagctgagttactatattcaaactagtggtttacataaagtgagacaacaactgtttcacaaaaatgactataaaatagtaagtagtattaggtcaattgattttaaaattttaatcaaattcaaatttgtgatataatcaaatttgtttatagaaaatgttaagaaatcaattttggcagaactaattcagtgagaaacaatcatttacaaaaacaattttaacattatttaacagtaagatttgacatttaacccgttcgtgtgaacccatcatatctaacatggctctacccatgacgcctccatgccatggacaattttgacagatcagaagttctgaacgtggacgaggtaagaacaccatgatgatacgattggagttagttatgtcgccaccgacatcactgccaatctcattaataaaagtggtactaaatctctaatctctattaactataaatataacaaagaaccaaaagaaagtttcttatctctcttatctttcataatttccaagaaacacaaaccttttctacta

SEQ ID NO: 15 - DNA, 1000 bp, Arabidopsis thaliana
  misc_feature: Ceres Promoter PT0688
acgttcagaggcatcgcttttgtacaaattgaagcgggtttgttcaatatttaaaataacacaggaaacattcaaatgtattattgatgttgcttaggtttgtgaaatgatatgaaccatatcgtatatattactagatttttcttatatgttttaagggtagtggggctgacctatcattctgtttggcattaccaatcagactatcagagtattcaccattcaggattccataactagaaaaagaaggggtttacattttctcatactgtataattttctactatcagagattttatcgattacattaatctcatagtgattattctgatttataaaaaagttgacaaaataattaaaaccagtattttataacaagattgtctctctcccatggccattattttgacctctgacttatttaaatcttaattaacagcataatactgtattaagcgtatttaaatgaaacaaaataaaagaaaaaaagaacaaaacgaaagagtggaccacatgcgtgtcaagaaaggccggtcgttaccgttaaggtgtgtcgaactgtgattgggccacgttaacggcgtatccaaaagaaagaaagggcacgtgtatagatctaggaaaaaagaaagaatggacggtttagattgtatctaggtaccaggaaatggaacgtcacaccaaacggtacgtgtcggatcctgcccgttgatgctgacggtcagcaacttccccttattcatgcccccctgcccgttaattacgtgtaacccttccatgcgaaaatcaaacccttttttttttttgcgttcttcttcaacttttctttttaaatcaaaccttttctttttaaaatcacattgcatttcctaacgctcaacaaaatctctctctactaatatctctctctctctctctctattgttgaagaagactcataatcggagattgtttgtttttggtttgctctgtaaattggagaagttttgttagagatcaa

SEQ ID NO: 16 - DNA, 1000 bp, Arabidopsis thaliana
  misc_feature: Ceres Promoter PT0695
aacattttctttaacttactcttaaattttaatagtaagttgatgcatgttatgttgatccgtcttgatcacaaatattgttttatggacgaattctttgacagtaaatggctatagtgactcagcttggagcatcccgatatgaaaacaaagtgcagtattgtgtcgtggtcatcactaacgcactttcctagaactatcgcgcgtgtttgacctatgcaacacaccagatgtcatgaacgtatacttaaatagaaacaatgatatagacaattggctatattctgtcatggaacgcaaaccggataacatgtctattagattcatcggacttgatcatggttatgtcttaatagacgaattctttgttaacgattggttaaaacggctcacgttagagcatcctactatgacttcaaaattgataaatattacatggaaatcactttaattttagttagaaggtagttaatttagatattcttatttaataaattaaaaaatagaagaaaaaaagatgagaagagtttttgtttataaaataagaaatatcttttattgtaattttaaaattaaacaaatttaatttatattaaaattatctttgttttattgttaaggcaataattatttttttggtgggaattgttaaaacaataattagtatactgttaagtggtcctttaataataagataacgtgatttaaaaaagaacgagacaggctaatatagtagagaggaaaaaatacaatttaggcccaataaagcccaatatagagttgtgctcaaacacaggtcttcgccagatttcctatgacgccgtgtgtcaatcatgacgccaagtgtcattcaagaccgtcacgtggcgttgtttctacacataggcgatccatacaaatcagtaacaaacacgaaaagagcattcatatgtacgaaagtagaaaagaagagactctttgtgataaaactaagtaagaaatagcataaaagtaaaaggga

SEQ ID NO: 17 - DNA, 1000 bp, Arabidopsis thaliana
  misc_feature: Ceres Promoter PT0708
gtttccaaaactagtattctttatttgctctattcattatatttttatatttgtaacgtcccgaccgtctttattaggtttcgacaatcacttctcggaaggtcgtccatcctgaaattactctatcctaaacatgtttaactataaaattctctcgaaacttttgtaacgtatataaccacataaattctcttaaacttatttgcatacaccattatatttctgaaatcgatatgttacaatattatttaatatttagattacttttactgaatcgaattaaatatcaaatcgaaacaaatctaatctaccaaaaataattttgttataaacatttcttgcctagttctacctcatatacattttagttaaagaaagaaatcacaacaattcccataattcaataattaaatccacaaaatcttggagtaagtaagagaaataaaaagatagtatcttaacataaacaattcaaagatgctctctcacacaattcacacacacttacaaaacaaaagacagaaacaatgttttcattcaaatcaaaagaagttataacactagtacaaaaaaagctcaaattctaatagtaactctttttatttcccaattacccaaagattctctctcacttcacaaaactagctttgagagtcgtgttccacaaaatccattaaagctgaaacggttttgctcaccattcaaacaaatacaaaattgcaaaaccccaaattataacaaaataatataaaaattaaaccgctaaaaagagtgaaccaacaaaaatcgccgaatgtgtgtgtaatgagaaaaccgacccatcatcccaatcatctcttcccgtgtcactctcttcctctcccacgtttcttctctcttccctttatgggttttaacttctccttcttcttcttcttcaatcttcagttttcaaattcaacaacaattcacattttgatttcttcatcatctctctctctctcgcttctctctcaaatcg

SEQ ID NO: 18 - DNA, 1000 bp, Arabidopsis thaliana
  misc_feature: Ceres Promoter PT0710
tagtgcgcgtggggagagggaatggtgaaaccttagtggttaagttatgaggaaaatgataaaaggataaaacaatcaaatgcagcttgaaacggccataacataaagtaccttatggtggtgcgaatatttttgtgtttctttcactcttttattgctgaaagctacgacacttgtcttaatatattgtttccgcaagtcacatgatctactttttatttaacgtctagaaacgccgagatatatgatgattagtatatcacgtctatgcaaattgttagttcgtgtttggccaaaagatatcgagacatgtctgaagaaccgagtctggttttgagatatttcttcaagcattactatacaatagaaaaaggagacacgcgaatatgataatagcaaaaggcataaaaaggcgaaaattaaagaaaaacgtaaagtgatttggcctcaatcaacgggaacgtatcttaattttagaggttcttcttttacttttgagacgagagagtttgcgtctttgcgagctgctttggttgactaaacattatcatattgaaaaccaaaatacaacggaggaatatttgtcacagtttcactttcacattgtttccttaacgtttaatcaaccttgttcaaaatttctatagttgtaatcatcattgtttacaaaattttcgttcaaagatgattttaaataaaattgtgaaagaaaaccttttctgaaataaggattggatgatagtgttaaaagaaaaatatgaactgaggcaaaaagaggagtggtccccggaagattgtgaaatgtgtcatctaaaccagccagacgtagtcacgtgttctctctagctttatgaacttccttagccagcaccatcattgtgattgtagtatatatgtaaccctaccttcatctctcccattttccattctccatatagactcctttacaatatacaaaacctatccaaaagcgaagaagccaagcaaacatattataaaa

SEQ ID NO: 19 - DNA, 1002 bp, Arabidopsis thaliana
  misc_feature: Ceres Promoter PT0723
gtcatatcttatcaacacgtcaacgatcaaaacctttagcctattaaattcaacggcttagatcaaaacgaaactaggtgggtcccacttttaatatcgtggctgcataacatttcctcgataactgaagccgttgtggtctttctcagaatctggtgcttaaacactctggtgagttctagtacttctgctatgatcgatctcattaccatttcttaaatttctctccctaaatattccgagttcttgatttttgataacttcaggttttctctttttgataaatctggtctttccatttttttttttttgtggttaatttagtttcctatgttcttcgattgtattatgcatgatctgtgtttggattctgttagattatgttattggtgaatatgtatgtgtttttgcatgtctggttttggtcttaaaaatgttcaaatctgatgatttgattgaagcttttttagtgttggtttgattcttctcaaaactactgttaatttactatcatgttttccaactttgattcatgatgacacttttgttctgctttgttataaaattttggttggtttgattttgtaattatagtgtaattttgttaggaatgaacatgttttaatactctgttttrcgatttgtcacacattcgaattattaatcgataatttaactgaaaattcatggttctagatcttgttgtcatcagattatttgtttcgataattcatcaaatatgtagtccttttgctgatttgcgactgtttcattttttctcaaaattgttttttgttaagtttatctaacagttatcgttgtcaaaagtctctttcattttgcaaaatcttctttttttttttgtttgtaactttgttttttaagctacacatttagtctgtaaaatagcatcgaggaacagttgtcttagtagacttgcatgttcttgtaacttctatttgtttcagtttgttgatgactgctttgattttgtaggtcaaa

SEQ ID NO: 20 - DNA, 1001 bp, Arabidopsis thaliana
  misc_feature: Ceres Promoter PT0740
tgtggccactaaagatttacccttaaccgggcccatataagcccacgtcaagtggcgcttatacgctctccgtaagagagccaacatttggtatgtaatgttgcaaattattcttcaagacaataaattcaaatataattcaatattgtccaaatatagtgatgtacttcagttgtgcacatagaaactccactaaaccaacttttagatagatgcattcacaaattttcaacaatgtcgcgaaagtctaatccatcaccagattctaacattttaattattatatttaactatacatactctaatcagcatgagtcaaacgtgtacaatagcccaagcatataataagaccaaagtcaaactcaaataaatgtctccaaactcaaaacttgaaaaagacctaattattacatggtagatatgactttgtcgacaagtaaaccaactaatcctcgaagctaccttctcttcccagttattatgtgtgatcgatttataaatctcttcttctaataacacctatatttttcttatgatgtgaataaatataaaacttttaactttaaaacatatttatccgaaatattgcacttagatttcaaatagataaataatagtactatctaactgatattgaaaagacctaacacggaaaacagttttataaaaaatcccaaatgtgggtaattatcttgatttcttgggggaaacagaaaatggattaagattaatcggagtcgtgtcaagcagctcgttaataactgtagcaagttgactgagtaagcatcaacgtgtcatctccgtaaagcccattatttctagtctcgccgcgtcttctcttccacgtagcacttcactttttctctccttttgtttcctttggaacacaaacgtttctatttataggaataattacgtcgtccgtatctgtgtcggaacatagatccaaattaaaagcgacttacttaattacatatcgttcgtgtttttttcttcaaaaa

SEQ ID NO: 21 - DNA, 1024 bp, Arabidopsis thaliana
  misc_feature: Ceres Promoter PT0743
tcgattggcccgatcggccccaaaatcaagctgagccgcttcaaacttcagcttttgaaatcacccccaaactcatgtcctcttatcattataactaaaggatctttcattttatttaactcatcgtcttgcactacccaacccaaaggttccaactatacccgaagctttctaaaggtccaaagactttttttttcgagccagactattcaagccaagaaaagccaaaccccacaagccagtacttttcaattccatattataaacttatctgtcttgttttagtcccactaaaaacaacagaatttaatttaggttgagctaaaacccttgacaaaagtgtatagtcgtcgattcagtagcacactcatcactcatcagatttgatagttgacctaaagtatgactactccatttcaactaacaaatgaaaataaaagagacctaagggttagaggattgaaactatactctcaagtcttttatcactaggctactaccagctagttaacttgatggatttaagcaagaaaacgtagaatttatattcgagcagattgtttagctaaaaaagcttgggtttgaaattgccttttctcccatataagcacgtcggttcctaaataactctttctagcggagagtgtctttccaataatttaataaaaatggtgtttgtatatcaaaaaaaaaagaaaaaagaaactgatcgagatagaacgtttgcagttttataaacaatttaaaaaacaaaaaaaattaaactcaatgtattttttattaattcacaaacaataataaatcataggatcgaatatttacacggtatcaaaacctactcgccgctactatataaaaattgaagtcaaatatcaaccgcaattattaaaccagcaagacaataattcataaacttaatataaacataaataaattaatgttacacaacgatatatggtgagggttattactatcttcttcctctcaaaacacatctcctaaccttaagctttagacggcctgc

SEQ ID NO: 22 - DNA, 1000 bp, Arabidopsis thaliana
  misc_feature: Ceres Promoter PT0758
agctagccacatcagtgaccaaaaaagataattaacaaaccaaataaaataacaaattttgatcatttggaataaaatttataaaaggaacgaaagcgccttctcacgggtcccatccattgaaatatattctctctttttgctctatataataataacgcgtactaatttgtagtatatattattacaaagtcgatatttgattgttttgtgaacgttgatatattaattttcttggatgatgacaaaaaaagtcatagaaagtaacgtgtgaacatagcattaacaaaatacaaacataatatataaccaaatatatgaaaataggataaaatctcattgaatagatcttcttctattcaaatatataaatatttgtttgtctataaaattaacagagcattcacattatctaaaataatagtaaaatcaaaataaaactaaataaaaataactctggttttataacgattgattttaaatattagtttttgttgtaaagagatcattatatatgtctgtaatatttttatactgagttacatgatatttagttattatagcgtaattaactaagataagaaattaactaaagtgatattctgattattattatttttgttaggacacgtacgtggaaaaactaaacactataggttacaaaacggtataataaactcaccattactggaaaatgtttgcatttgactcaataagtaacttattataagttactgatataatgcatagttttgaaattcttaaataaattattttggtttcgcatgaaaatatgaaaggagagaaatttattattgtcacttatatatatatacatcgtaatcattttttcgtgaataattctctctcccattccattatttctcagtatctctctttctttcccttactttattgttgcttttaaaccttcaatttgctcataaaccaaatatataatatcaaaacaaacaaacaaaaaatcagaattcccctaata

SEQ ID NO: 23 - DNA, 921 bp, Arabidopsis thaliana
  misc_feature: Ceres Promoter PT0829
aaagttttgaattattgggaatcaatttcgaagttttgtaattctttgggggctaataggatattttattttcttggtttcgtctattgttgtttttctatttatggttgggcttttagaactctggacaggcccatgtcatatgttttcccttctccttatatttttcatttttcattttgttaaattaatgcataatatccaaaaacaatttaaatttttgaaggaaccctttagttacggctccgaagctttcacaagtgagaatgtgagatcaaagaaggcaaatggaggattttaaaagttaaaatcatcttttatctgcaaaagttgacaatttttttgtatcaaatctaaatcatcaaactctcttaaactacaagagcataacaacctctatgtaatccatgaaataatctgcttgaaggacataacataaatcattatggctagagtgactaacttcaatcaaatcctcttaactctagctcccttacaatggtatcgtaaaacattatgcattagggattgttgtcctaggaaaataaaataaaaatccccacagaccaactaccattttaacttaaaaataagcttcgtccgcgacgaattgttttccatcctaaaaatagaatggtgtaatctgctaatggtttagttccattaacttgcaagttctattgaaagcctaaatgtcaataaagatattaaaattcggagtcaaaagacaaatgaatcaaaagcaacaagacaagtcagctccattcttcactacccatcttttacaataaatcatctctcttttcacaaatttcaaactactctcattgccctttagctttgttatagagccaacactacagagagactcacacacttgtttcaataattaaatctgaatttggctcttcttataaacta

SEQ ID NO: 24 - DNA, 763 bp, Arabidopsis thaliana
  misc_feature: Ceres Promoter PT0837
aactacaagggagacataatatcaccatctggttcctgttatcatctgaagatttcttgttttaccttccagtgataaaatgatccttataatacatatagatatattaaattgctgtattttaagattatagatatataaggtacatgagagtgtttatttaaaaaaattcacttggaattcatgttttgtgatacgttagattggaatccatttgggaaaagaagaatcatctgttcttatgtctcaaattttgacttcattcacttttcttcttgtcttttaagaaagcttccacaatctaactgttcgatgtgaaaactgagattcgagtaagaaaatgtgaactgtgttatactgttttttaattagataatttagattgcactcagataaattaataacattcctcgaatacttttatgtgattggatatattaggtatatctgccaaccaaccaataaactgctatgtttaaacaaattaaataaattagtatatgtttactcaagaataaagaagatagaaaagaaaattctatatgagctaaatttgctggaggaggcatcggacgtgggtaccagacctttccaagcacacgagtagtgcttagccatgtcatgctaacatacaccatttggttcatacaaaatccaaatcaaaatctatttttaaaatcttttgcacacgtctttgaaaaacacctctcatactatagctacggaagcttcaatttcaaggtttgtctaaaagctaacgatt

SEQ ID NO: 25 - DNA, 751 bp, Arabidopsis thaliana
  misc_feature: Ceres Promoter PT0838
atactggtatgcttaaggttgaagccaagatctctgtcttacccaagtaaccactttctattagaagggatcaacactaagaatatggagatttaagcctaagggctaaggcggttctcaacaatacatgatgtgaatacaatcacagacgatttactgaggtttgttgataagatcttgatcagtctctgcatcatctgttcaacaatctcaatctttgactgtttgctttcggagccataaacagaggaatcccttattccctgttataggagcaatacaccaagtattatttccatggctgaaattctcttatggaaacctaattgttccattgaagctgtaaaatcgaatctggtgaatattctcgagcaaagccgcatgctaattatgtcaattcagaagagtttgattaggagactcgaagcgagtttgatgatctttcttgatgttcaactccgattgtaagggtataattgacttttcatgtattacggctccaccacctgacactaaggcactctttgtccatctcgttggtatcatcggattcggatggtaaaaataaaaagagcagaggaaacttgttactcatgcaagcttctcaggtgccacgtcactccattacgtgtcatcttcacacaccatctcgctcaaaaccgatctcatttttcaaaccttaaaggcagaagcaactgattaagttaacactcttgagaagctctcgattaagcttgaacttggaggatca

SEQ ID NO: 26 - DNA, 669 bp, Arabidopsis thaliana
  misc_feature: Ceres Promoter PT0848
tctctttaaatcagttaactaaccgtttatatatttacgataaggtttgaagagattattgataaaataatacatttcataatcccgcgttcaaccgtttaaagtaacatttaagttgactatatctaattttttttccattaaatatggagctggtaaactttatcaacttctaaaaagtgtaacaacaaaaattaggtcaatcacaattctgttttttttattattttggattgacttccaattgcaaatagtcttagtgatcaccattatcatacatatatacatcaagtaggtttcatcatgatataccacaaagtatttgacaagccatatggttttggatcaaaaagtcggtccaaaattaatgttttatgtgcaagaaccgacccattgtacacacgtgttaacatcttcaagactttcatctctatttttcttttggtcattaagatacccattgatccgaatctgttacattcccacctacttttttaatttttactatccactccaaattaaacacaaccgatgattttaataattggaagcttttaaaaatatttcaaaacaagcctctttgtgtttgtctatatatatacacgtaataagaaggtgaatgaatctcacagcttacttgttctaaggcttccaataacgaaaacagta

SEQ ID NO: 27 - DNA, 702 bp, Arabidopsis thaliana
  misc_feature: Ceres Promoter PT0863
cgggaaacgacaatctgatctctagtccagtcgattggcccgatcggccgattataaacttacatgagacaagtataaataattattataaacttattaagtttaagatcaaggcttttgtgcaatgtatcaatgaatgttagatgtgatatgatgaaagcaatgttttaaacacatacatagtcattgatcggaatgtgtgttattagaaatgcatgcctaagccgatagggttatctatgtttggtcttggacattatagccaaatttcgaatctaattcttccaatatatatttttttttttttgcttagggccactactagtattgcttatcaattttaagagctcatgaaaatgcaacaatatagtagttgcaaatccttgtttcaagagaaatcaaagggccacttgtgaattgaataataataatatttgcaaataacctttcactaaaccataccaacaaaaccacacagatttggcaaagacataacctttgggagacgtgaaaaggctcaaaatttgacaattgtccttacaaattcgctcattagtgcaattgtgagatttgtttgcatccaaatccaattcataactcacactcgtctcaaattcgaaaaggcctgcagggccagtgcactgggatccaacaatgtcctccgactcgtccaagatcaagaggaagcggaaccgcaccgcg

SEQ ID NO: 28 - DNA, 435 bp, Arabidopsis thaliana
  misc_feature: Ceres Promoter PT0879
ttctaggaagactggtcaagctaagctgtttctgttttttgtttttgtactttactttttgtttgctagtgggaactgggtttattgggccttgaagttgataaaagatgaataaaagacatatcgcctaaagcccatatgagaagcagaagacaaaaacctccaactttgggcataaattttgattatagttaaaagtccagacccaatttggcacctggcttagttacgattctaaggcatgacacctgcctaatatgtttattacagaaaataaagagaatcagctaggtgtcccttattgaacacattaacaaactccaacgacactacgtgtcttcgtgactcttactatatccaaaaacctatagctaaagctgaattttccatgattagtatagtcccaaccaaaaaaatactgaagaaggcataagc

SEQ ID NO: 29 - DNA, 397 bp, Arabidopsis thaliana
  misc_feature: Ceres Promoter PT0886
agtgtatttgaaaacgacattgaagaattaatatatttttttttaattttagttttttatagtacaaatattaaaacaaacaatcctaccatatcataacatttgtaaataacattttaagttttgttttgagttttaattaattttctatgacaaaaaaatgaagtcaatagactaagtgaatcatatagtataaataaacacaatttaaatagtttcaaataaatttagaaagaataaaacaaatagaaatcagaaggtgtctgtttcctcctcgcaacatacgatcaaagagaaacaacttgaccctttacattgctcaagagctcatctcttccctctacaaaaatggccgcacgtctccaaccttctcccaactccttcttccgccatcatc

SEQ ID NO: 30 - DNA, 1024 bp, Arabidopsis thaliana
  misc_feature: Ceres Promoter YP0007
agcagaacaactatatttattgtgtcacataaatctgagatcatttataaccaccaaagaacctatacacagtaaatgacaaatgtatctccctctatctctattgcccatatgtagatgctaaagtaagatttctcttttttttaatgtacttttttttgtataaagtatattccataagaaaaaggaaaagcttgtttatggatcaattgaccccaaaaaaagtttttagatcaaagcccaatataaaaaaaaaacacagtagtgacacaaaggaacttaaataaaccatgaattgatctataaacagtagagatcgataaggcgaacattttccatgtgaagtgtcttctttcatctataatatttttgacatccaataatttcctctataatatcattcacataattgatagaaacattatgttagaattgtccacatcatttgagctgtaatatattctgttttaacaaattatatggtagttgcttaatcttatgtccatcttcttctatgcatcgttttcgcgcctagttgtccagtccatttcaactacctacctctaattcttatcttaaaacaacattttttaatttaagtattatgctcaaagactaactagatagaaaaccgttattaaacattaaacgaattaaaagtcttacatggaaaatgtaggtttataaaccacgagttatgattgacaataaaaaaaatgcaaatcatcaatcaaaagagacttgagtgcgactctatatcaaccattgcaattaaaattatctatcacaaaaattttagacagattaagttaatttagtctaaattcactaatttattttctataattagtaattaactatatttatttatttacacattttctgataatttagaaatttgcatgaataacaaatataagattttggaaattagtagcaaatttaattaataattatttttgcctaaatgaaccaaactataaaacctccacatacaccagtcatcaaatttacagagacaaca

SEQ ID NO: 31 - DNA, 1000 bp, Arabidopsis thaliana
  misc_feature: Ceres Promoter YP0008
ctcgagagatgaagtcttagtaatgtttgaacaaacaataatcacgttttccatcaaattcgagcatttaaagtttatattactacatgccccaagatgataccgtccatctcatccgaaaatatttctgaaattgcgctaagacaacaatgtttgctcaaattcgatcatttaaagtttacaaatctctcatcaatcttacaaacttctcacactaaacagaggtacatattttcttataaagacaaaaggttcgaacagctggcttctcaactcgagttgtttgtcagggcctctcttcactaactacaagttggtacttcaaatattggtggctagcttcacgtgatattgtctacaaattaaacccatgaaaaagctgcattaattgttccaagtgaaccctgaggagtgtcaatagtctttgctttagtgtgatcattaaaccaaatctctaaattcctaatttgtactaacatttggaacgtatttcctactcttctccctgctccaactcccaaaaataagattagttagatttctataactaatatacatgtatactcccaaaaacagtaaaaccatattaataaagctaattttgcatagatttatttcggtaaaccggcggttcaagttggggaaaaaaaagacaaacggtctaaagtcatccaaagacaaaaaaccaaagacaagttgagagagacgagaccaatcacaacattgcttcgtagattgcgtgacatcatccttgacggctactttcatttgtgtcttatttggataaaacgcacgtgtttaattcacgaaccttcatagcaataagaaatttccattactttcatattttcaactttttttattacccattacatgcttaaaatattaattcacaagtctttgtcaaaattcaatattttccaggttcatgaaccctttttatctcaatctactctataatatctccctataaattacaacaaaacctctttatttttca

SEQ ID NO: 32 - DNA, 999 bp, Arabidopsis thaliana
  misc_feature: Ceres Promoter YP0019
gatataagtagaatcattttttgccgccgtttctcgctaacacaccgaaaactgaatcaaatctcctagctcttctacgcaaaatcgagtgcatcgacaatggcggaacgtggtgtcgaacgtggtggagatcgcggcgatttcggacgtggattcggtggtcgcggcggtggaagaggtggtccgagaggtcgtggtcgccgtgcaggtcgtgctccagaggaggagaaatgggtgccagtgactaagcttggtcgtctcgtaaaggaaggtaagatcacaaagattgagcagatctacctccattctctcccagtcaaggagtaccagatcatagatttactcgtcggtccttcattgaaagacgaagtgatgaaaatcatgccggttcaaaaacaaaccagagccggtcagagaacgagattcaaggccttcatcgtcgtcggagatagtaacggtcacgtcggattaggagtcaaatgctccaaggaagttgcgacggcgatcagaggcgcgatcattctcgcgaaattgtctgtggttccgatacgaagaggttattggggtaacaagattggaaaaccacatacggttccgtgtaaggtaaccgggaaatgtggatctgttactgtacgtatggttccagctccgagaggttctggtattgtggcggctagagttcctaagaaggttcttcaattcgctggaattgatgatgtctttacttcttctagaggatccaccaaaactcttggaaacttcgtcaaggtatgtactttcacaatggctgttttggtttgatgaactctgaattaggcagtgaaaaagtaatcattaccagttaagtgaatttatattgaagattaggatttagctgattgtattggtttgagcatgtgagtttgtgtttaagattgcttgaattgaaatgctttaggttgtttgattacgctaaattctgactaatgtaattcaaattgttgttgtttttttttggtc

SEQ ID NO: 33 - DNA, 1024 bp, Arabidopsis thaliana
  misc_feature: Ceres Promoter YP0028
gtcagtgaagtcgattggtagtacttgaaacacttggttggtttcatgtatttggcctatatataaacaaacatcgtaattatatacggatttttttcggaattttacgccatatctgtaagtatatataacatgcatgtcgttttcaaattcatatgatgaacgatccacgtaagtgctactactcctacaatattgcatgagagagatatgtatttataaattttattttgaagaagaaataagagggaaggttacttgggtggatcgatgtgaaaacaaaagaagaaaaagcgaaacccactaagccattacatgatatcgaccttcttatctttttcctctttattttatttttctcatcttctttttgtcaggacttttttctacttaatgaaacctccaaactatctaactaatacactcccatgtagaataaagaaaattatataagatattgttgatattttgtaactagaaaatatatttgctctgtaatttttcgtaagttaaatcaacattttaaagtagaaacaaatattactgcaaaaagtaggatcattatttttgtccaaaatctcagttagctatagggttgtagtaaaaacaaaacacattcttgatttgccccaaaaaataaagagagagaagaatattgttcaaaagtggtctcttctctctctaattatgttttcactaaacccaattagattcaaacagtctacaaagtccaaaagataaacatgggacaacaattcgatgcaaaaaatcctcttttcatgctctttttttattctctagtcttttaaattactaataaaaactcacaaatccaccaaacccattctctacaactcaccttcatctagatttacccactcccaccgagaaacacaagaaaaaaaatatacatatataaatatacaagacaacacatgatgctgatgcaatatacacaacaaagtattaaatcttagatattgtgggtctccctttcttctattcattttcttattcattaaaa

SEQ ID NO: 34 - DNA, 1024 bp, Arabidopsis thaliana
  misc_feature: Ceres Promoter YP0039
ccgttcgagtatttgaaaatttcgggtacacccgcctaaataggcggaccttatctagtatatatatacatttgaactatattgtttactttttagttgatttaggctatgtcatgacattgacataaatctacctgttatttatcacgtgtaattcgtgtaaagtgtaaactagaaagttcaaatacgtatttgtttttgttctgttatataggattgtcatagttgtaaatctacaatttattacaacatgaataagtacacaagcaatgtaattggatttaattgctaaactctttacatggtcaatctaaatttgataagaaatacgtcacatattactaagactgatagtttttttgttgtcaccaattatttttgttaaattgacgaaaacaattccaaaaactcaaatgtacaaaatcatacagtctcacaaacatctcatagagaaagatataaatctcccatatgggaacgataacacgaggtcgaaatactattcgtaaaactaaaacgccttagttataaatcgttagttgtaaccgcggtcgagaatacatacagatccacgaaactactactacacatgctgctgaattggaatttggaaaagaccatcttctttaggaagagctcacccaatgagtgacaaaggtgtcggtggcttgttttctacccatatgtatacatcaaatggtagtttcattaacgtttggttttgagaaaagtaagactttggctagtagctaggttcgtatataataaactcttttgagaaagttcatcactggtggaaaatgttaaaccggttttttctcattttttccgccatgttaaccaccggtttaaaaagaccgtaacacattgaaagattaataagggtatatttgtaattacggtttgctggcaatttttaattattattttaattagagaaaatagagaagccctatcaatgtacatggtatatatataaaaggcaaaaccctagaaaacgatactattcgactcagccgtcctt

SEQ ID NO: 35 - DNA, 1024 bp, Arabidopsis thaliana
  misc_feature: Ceres Promoter YP0050
aatctgatctctagtccagtcgattggtacttgagggaaacatcatatttttaaaccttgtctcagtaagctaacacacaccccttgtgattacttatccatgtttatccacaagaatgcagttggattgagatattttcttctttgttgaaatcaggcctcaaggtgttcatgtggtctgcaaaaaaattcccaaaaataaagatagtgacatctgaaatcgataatggattagacgaagagtttcgtgttattccttggtatgggcgggtttggggacagatattttggcacagacgaggactaggccactgtggtcctgcagcattaggtgtcccttccatgtcctgcattacattttattgatggattcatcaccctatctactacaacggctacacaaactatgaagagttttgtttactaataaatgcccaagtgaggggtcgatcgaacccgggacacgtttttcagtttaccatatagaattatccttggaacccttgatactccatagaacatcaccacctctgttgtcatctcaggaatccaggttcaaacctagtctctctctccctagtgggaggtatatggccactgggccaatgatgacaaaatgcaaaaaaaataaaatacatttgggttcattatctaaaatatctcttgtgtttgtaagttttggttgcacactcgtgtggttgaagtgtgtgtgagaggtactatacaatacactctgcttttgttttgtacctatctctttctcttctccacatatccaagactttggggataaagctgagatcattggttgccatttggttgtgtagaagcaatcacccatttgctttatccgaggttgataaatttcctcgggttctccttctgacacgtatgacaaattctaatagtatattcctcgtagatattacctatatattctcaatagttgcaggtacttaaggctttgtcttggcatcctcgtcctcttcagcaaaactcgtctctcttgcactccaaaaagcaa

SEQ ID NO: 36 - DNA, 999 bp, Arabidopsis thaliana
  misc_feature: Ceres Promoter YP0086
cttatcctttaacaatgaacaggtttttagaggtagcttgatgattcctgcacatgtgatcttggcttcaggcttaattttccaggtaaagcattatgagatactcttatatctcttacatacttttgagataatgcacaagaacttcataactatatgctttagtttctgcatttgacactgccaaattcattaatctctaatatctttgttgttgatctttggtagacatgggtactagaaaaagcaaactacaccaaggtaaaatacttttgtacaaacataaactcgttatcacggaacatcaatggagtgtatatctaacggagtgtagaaacatttgattattgcaggaagctatctcaggatattatcggtttatatggaatctcttctacgcagagtatctgttattccccttcctctagctttcaatttcatggtgaggatatgcagttttctttgtatatcattcttcttcttctttgtagcttggagtcaaaatcggttccttcatgtacatacatcaaggatatgtccttctgaatttttatatcttgcaataaaaatgcttgtaccaattgaaacaccagctttttgagttctatgatcactgacttggttctaaccaaaaaaaaaaaaatgtttaatttacatatctaaaagtaggtttagggaaacctaaacagtaaaatatttgtatattattcgaatttcactcatcataaaaacttaaattgcaccataaaattttgttttactattaatgatgtaatttgtgtaacttaagataaaaataatattccgtaagttaaccggctaaaaccacgtataaaccagggaacctgttaaaccggttctttactggataaagaaatgaaagcccatgtagacagctccattagagcccaaaccctaaatttctcatctatataaaaggagtgacattagggtttttgttcgtcctcttaaagcttctcgttttctctgccgtctctc

SEQ ID NO: 37 - DNA, 1024 bp, Arabidopsis thaliana
  misc_feature: Ceres Promoter YP0088
tcgattgggattactacttcatctagtaaggttctgaaaacgtttgttgttgataaggaagattcgtctcaggttattactgttgatcttcaaggtttgtgattgtgacgcttatacatgtgctgaaactgtggtgtttatttattgaaaacaaaaaaaaagtctctcttgtagtttcattgtactaaatagaaaacaagaaacgtttttttctttaatcttctacattgataatattggatcaaaggattgtttctgcaagacacaacacaaacatacttatactagtttacttctactaagtactaactacatacccatacacacacttgcacctagactttacttctagacatcattaccctaaggtagaaccaagcttacaagcaagttttaccgacaactcttacattacaactctagtctgtagtctttaacgtagacttactaactagtcattagtggtttaattttttaaattttcatccatatgtttttgttgtagatataaactaaagtcggtcacatttaataattgtcattatgtccgcgtaaaagtcaattcagctattggacatttatgaaatgtaagattttctctctcatttccccgtgcgtgaagacatgcattggtttttctgtaataatcaacaaatccaaaccccttttcgatctttatttggacattgttagagacaaaatttctctatagtctttttcctaatttgataccatgtttttgtttctgcacaaatttactcactggtttaactaactatccacttatttatgattttaccattaggcgtcagctagccctagtcaaatttgtaaacaagccaagctatctacataaatcgagatgtcattaacgttaatcgtcgttaattcgaatttgaaaacatagatagctttagcagtacaatgggcaatggtaagaagaatagcaaaaggcccaatatttggtttgcagaaattaaagccttaaaaaaaagcccacagatatttgtcaaagaaccctaat

SEQ ID NO: 38 - DNA, 1024 bp, Arabidopsis thaliana
  misc_feature: Ceres Promoter YP0092
aaagattgagttgagagagatggtggagacgcagaacagacaaagggagtttaccatatagtgctctaaagggcaatgagattgcagtgatgtggctatccggggaatcatcgcaggttattccttcccatgagcaacaatcaatggatgggttccaattcagaggagaaacagaagaagaaacgtttccagagaaccacagtagggattctcgatcttgcgagttgcagagagcctctgaaactgcaatagaaaggacactgatgaaaagaacacactgaaggagtatgccaatcatgtgaaaactcagagcttgtattggtcttgtggttgatgaagttctcacaaaacctttggctttgaatctcccctcattagtcatggtgagaacaagaacaagacgagaaacagacaaagaagatgaaaaaacttgttggccagtgttgactaagggggaatagccccagacataacaaaattagacttgtcgtacatctttaatatttttttatctgtttctttgtcctgacgctttcattattcctgtgatcaattttctcataccattggtccatcgttaatcctttcttaatttcattttctacgtaacatgagaggagaccaagtcctatgagaacagttgacgtaacagtggttgttaagttaagttaaaaagaggaagctagtgagagtgaccgttaggtagagaagtgagatctttaaccactcttctttctctctctctctgcttttttcgtcgtctttcacatctactgttcgcaaactctcttatgcttccaataatggtgataccaattgagacttgcaggagaatctcctcttctccacactctatcaactggtcagccatggaatggtcgtttcagtttcaatattcctggattctttttaaggattcctgtttctcttctgttcctggtatattcttaacgacgaaattagtatcggatcctggtaatacattttgaagcttttaagtaccattgcactgggatccaacaat

SEQ ID NO: 39 - DNA, 1020 bp, Arabidopsis thaliana
  misc_feature: Ceres Promoter YP0096
gaggtcagtgagtcgattggtgcaaaattgaaaaattgaagggtgaaacaaatttaaagataatatctattaaatcctctaattttaaaaatttagcaaaaattgtattttcttatggatctgttagttcacacgtatcttaattagtaccaaatcatatctaatgattagtgataaaactagttagatatctatatgtgtctttaccatttaacttgaatccttcttcttttttttacgtaaacaacttgaatccttcgttaatacataaatttaaagcattttttctttaattctattgatcggtatatatttactataagttttagctcatatgcaatttcaaatgatatgcttttaaattttgtctaggtgtgatagttgtatctttaacataaatcttatagcaaaattatacttgatattctaaatttatctatttgctcttgtgaacctcatattagtctagagaaactttgaaatcctttcaattagttgtatgtccaatacatttttactaacatttattagtctttttaattaagattattgttagaaaaaaaaagattttttaaaaataaataatatgttttagatacaatgtgagttaggcttcttatattttaaaaaataaatttatttcatacttaaaaatagtttggaatttcaatttatttggctgaataccataaaatatgtcaatttgaaccttatacccattgactatttggtgttagaaaccctttaacaaaaaaaaactatttggtgttagatatcaaaataaaaaaagtttaaccattggtttcttatattgaattggatattgttacatgtattaaagtttttttggtttaattttgaaacgttgatagaaactattaagtttaagtttggtagtatatttatttgtggaaaatttaattgccattaaatataacgtcaactttttttggttttttttgagaagttacgttgtgattttgatttcctatataaaagttagattacgtcattttttaa

SEQ ID NO: 40 - DNA, 1000 bp, Arabidopsis thaliana
  misc_feature: Ceres Promoter YP0097
ttcatctttatatttaagagtttaaaaactgcaacttttgtttttctttcactaagtcttatggccacagttaattaaaagcagatgaaaggtggtccaatggaaaaggagaatgtgattgggctagttgggagagttctgatgtctagtgttgggtacacgtgtccgtcagttacacatagcattaaatcagacggcatgtcattattcaaatctagttcacatagtacgactaatagctgataaattaatgattatacagcatatgaattatgaattcaaaaaaaaaaaaaaattgaaaatgttaaggagatgctatattttacaaaattcatcgcaatgctttctactaatttgctaagtggtcttctccagttagtcttgtcgattccaagcgatattattaaatcttgaagcatcgctcaaagcattatagcttaagataaccaaattgttattaaaaacacctagtgaaatttttaaattaaaacaattttgatatctttgtaatatctaatactactctttctgtgtctaaaaggattaattttcaaaaatttcacacatattaaaaaaaaaaaaaaattactagctaaacaattttcaataatcataaaacaatagtaacttaataatttttttttattttcaaaatagtccttcaagtttacaattcattttagtattataatcaacaaaatttgtattaaaaagttggaaaattaatctttgtggaacaaaaaaatctagaaatcattttttagaattagagagaggtttgataaaaaaaaataaaaaaaaatagagagaggtagtacatactaaacgatgtgatactactattgacaaaatcttaattctcagtttagtagaataaactagaaggaatgaatgaagtaaatgcgaatccaactactaacaaaccctacttagtcatcatattttcccatatgaaatccctatataaacccatcatcatctcccacttttttcatatcca

SEQ ID NO: 41 - DNA, 1004 bp, Arabidopsis thaliana
  misc_feature: Ceres Promoter YP0101
ttctcgttctctagaatattgctggaccggattaggtcaatattattgggccagattagatattgaattgtcgacgttgcttacgttacgttatatcttgtttaagaattaaacctatcgacttagtcttaattaagaaaacattgccttaaattctctggtctgcgaccgtttttttgaccgttaacccctaattaaagaaacaaaataattatagaaagagcactgaaatgtgattattttaacagtactcttatgagaaaattcgtactttttagttttttttttgtacaaatctctaagaaaaacactactactaattaagaaacgtttcaaacaattttattttcgttggctcataatctttctttctcggtccgggactaaccgttggcaaaaaaaaaaaaaaagttgacaataattattaaagcgtaaatcatacctctcaaataaaaacttgaatttggaaacaaagacaactaaaaaactcgaatttaagagaattcctaaaatcaagtgaagtatcatcacttggtaaaatttcataaccgttggcttctatttctatgtgtgccttggtttgcaggagataatatttcatttccaaccaatgatattcgtacacatagtcaaacaaatgtttgtctttgttattatattgagaaagaaacaagaaagagagagagagatagataagacgaaggaagtgaagcttccaagcgcccaccgttaaaaatctcgtgtgcaagtttcaaatacaagtggccggtggtctccataatttgatcgtcatccaattaaaaaggaagaaaaagcgtgttttatacaagaaaactcattaaaatagcaagtctagaaatatctcaacactaatctaccacgtctattacacacacacacacacacacttgatcttaatttattttcaagattcaagaaaatacccattccattaccacaacttgaccacacgcctatatataaaacataaaagccctttcccc

SEQ ID NO: 42 - DNA, 1000 bp, Arabidopsis thaliana
  misc_feature: Ceres Promoter YP0102
atttggttgataacgttttcactcgactaattatatacttcagaaggatagtaatagaataccaaaataattaaatgattggttagtgccttagtggagactttttaaccgattctaatagactaatgatgtagctaagcatttatttgggatcatcactgtttgaaaacgtgaaatgtgataaaagttatgaaacgattaaaatataaaataaccgtacaaaacattatgtaccgtttttttctctgttcttttggcgatttggtttagttcgttacactctaaatgttattgcagatatatatataatgatgcatttgcatctgaggaacatataattccggttaacacttccaaatcttatatccgtctaggtagggattttataaatcatttgtgtcatcatgcgttatgcttgtcggctttgaccataacgcagagatatagaactagcttttacttaacttttagatttattatttgatctagagttaagtggagatatatagtgtttttgttagattattggtggatgtgagagtttgtctttagtttcaagttgagaatataaggcaagaggagactctgaggcaatcagaggttttgattggcaaaatatccaaaaggcccaaaccaagtcgaagcccatctcgtacaaaaaaagaaagagatctgtaagaaaaaatattctttgatattcttacaaaaataagtgtaaaacttttattagtcaaaatcttcaatctttaaaaactctcatcactcctacgaaagcgcgtgagagttatgagacattccttaatagcattactcacaagtcacaagttcaaaacgtctgactgaaacagaaacaagcctttgttgaagtcttgaagaagagacattagtactcgtcgtatagccataaaaggtaatatacgaaatttcttcgctaatctcttcaccttcctctacgcgtttcactttcactttataaatccaaatctcccttcgaaaacat

SEQ ID NO: 43 - DNA, 1004 bp, Arabidopsis thaliana
  misc_feature: Ceres Promoter YP0103
gttttgaagaacaatctggatcgaaatctaacataaggtcatcgtattcaagttacgcagtcaaggacttgacatcatcctactctggtctgaggttaccacttccaaagatgggatttttcgactcggtatgcttcctaagaaattcgttttattgaacctagcaaatatcttgtaatgtaagattcctgagatgatgaagaaaaaacaaacttttgttacagcaggagaacggagagaaagaaaacagagaaccaaatgctcttgaagcaaacagaagaagaagacacaaatccaaacttgagacttcttctacaccagaaaaccgcagcattctgggacaacgcaaaacacgaaagtgaaacgggcaatgatatatatgtcttgggtgcgttacaaggcatcgtttgcaactgttgagttggataagtcaactgtcttcttttcctttggttgtagtagctgccttttttttcctttgttgctttaagaaatagcccgaaaaaaagaatgttctacatttcggagcagaaaactaaccgaatgagtttttggtcggatcatcggatcgatcagatatattttgagttacgaactgttataaaaaaagccataattttgtgttgagtttgcaaaataccttataacttgttatttgagattgcacctccatatatattaattcgtaagagtatttattaagtaagctttagtataaatccttttttcctttaaagtaagttaatgttctactaaataatagtaaagttgaagaaccgctccgtttttacaccatgcacgtgttatctaacaaagaaaatatggtacacctaatggctaatgcaaaggacaacacaatgaaactaacttgactctgtgttatagaaacccatagacatctgcatacatcctagtatttgtataaattggactcaaattcctgaggacaatcatagcaaacaatcacatcatcgcaatatacataaacaaaagaggaagaaaaa

SEQ ID NO: 44 - DNA, 1003 bp, Arabidopsis thaliana
  misc_feature: Ceres Promoter YP0107
taacaatccttgggaacattgcatccatagatatccggttaagatcgatctttgaactcataaaaactagtagattggttggttggtttccatgtaccagaaggcttaccctattagttgaaagttgaaactttgttccctactcaattcctagttgtgtaaatgtatgtatatgtaatgtgtataaaacgtagtacttaaatgactaggagtggttcttgagaccgatgagagatgggagcagaactaaagatgatgacataattaagaacgaatttgaaaggctcttaggtttgaatcctattcgagaatgtttttgtcaaagatagtggcgattttgaaccaaagaaaacatttaaaaaatcagtatccggttacgttcatgcaaatagaaagtggtctaggatctgattgtaattttagacttaaagagtctcttaagattcaatcctggctgtgtacaaaactacaaataatctattttagactatttgggccttaactaaacttccactccattatttactgaggttagagaatagacttgcgaataaacacattccccgagaaatactcatgatcccataattagtcggagggtatgccaatcagatctaagaacacacattccctcaaattttaatgcacatgtaatcatagtttagcacaattcaaaaataatgtagtattaaagacagaaatttgtagacttttttttggcgttaaaagaagactaagtttatacgtacattttattttaagtggaaaaccgaaattttccatcgaaatatatgaatttagtatatatatttctgcaatgtactattttgctattttggcaactttcagtggactactactttattacaatgtgtatggatgcatgagtttgagtatacacatgtctaaatgcatgctttgtaaaacgtaacggaccacaaaagaggatccatacaaatacatctcatagcttcctccattattttccgacacaaacagagca

SEQ ID NO: 45 - DNA, 1024 bp, Arabidopsis thaliana
  misc_feature: Ceres Promoter YP0110
gggatgcggttccgcttcctcttgatcttggacgagtcggaggacattgttggatcccagtgcaatggtaatataaaacaagaaaacaagagattttataggacaatcactaaatgacatttaattgattaaacatttattcattaataattgtatgttactaacttcaacatttaataattttgtttaagatacgtttacatcagagactattaatatttttacaggttgtaactttaaactttgtcttgaatcgaacatgactatagattttgggcaaacttaaagataacaacatttccgttttttttcaaattattacaaatcaaactgatatattagacacaacacgattacacgtaatgaaaaaagaaaaagataaaaagataaaagaagggatcgattctgtttggtctggtttagtgagattcaaagttaagctcttcctttcaagacatgccttcttaaaccgggaatgtgaacgtttgtaatgtagtccgtccagttaatgcttccaacatcaaatccaaattctctcttctcgtcctctgacatattctccattaatctctggggtattgctgttatcaaatctgtaaaagaaaccaaaaaaaaaagatgaaaactttgcgggtaccggttttgtctgctctaagaattagaatgttaatgagttctgtcttaccttccaccatagaaagtgtatggctcataaatagtagcaaggtgtttggcttgttcaacagatttcttgcatataaactttagcttctgcatcatcttactatccactgaactcataccactcatcaacccactccgttcttgagcatctctccacaaatgatccgagaaatcatcaacggaattgaaaagtttcatcaaacgcaccataataggatcacctttagagtccatgcatggagatgttttgtagtggttataaagaagctccgctaagtcttcgaaaaccagcgggtttatcgccgaagaagcgatctgatacacgtttatttcaggttcc

SEQ ID NO: 46 - DNA, 1024 bp, Arabidopsis thaliana
  misc_feature: Ceres Promoter YP0111
cgattggatttagtctatacattatagggcgcaagtttgtggatttaagaattatataaaaacttgaaatatatagtttttatgcattctcctcttgtgtaatacataaaccaaatatgagataggttaatctgtatttcagataatattaaattccaaacaatatttttacttgttataagaaggcaattaatatctctctgttaatggcaagtggtaccaagtagtattaaactattaatgcaatggaagagtactgttggaaattataatcctctatcacacattcaaacagatctcctgaaatcttctcttccaaacttgtacttctctgatccaaatgtaggctccaaaatatagacatttaccatttactaagtccacaactcctttcttgtctccttcaaaaatgactcttgtgtaaccaccatatgactccgacagttcggcattgccatgatgagagcttaaaaattcaccttcctgagcatttcaagtcttcactcccttagcttgacctgaaccaagataaaatgcctttgtcgtcccgtaatatccatcctgctttggacggcatcatagttacattcgatccatcctatttacaatgttattttagtattaaaaacatgacaataaatttgttgttaaacatattcaaatacaatatgattggatttataagtaattgtaatatgaaatgtccttagtaatatgttaaaaaatacatagatacacacacgtactaaaagaggcaacgcgggagatgtcattagaggaagaactaggaagcagagcgttcatgcaaaatgctaccaaaaacgttaatgcaatatctcaactaatcagcacagtccatttcatactgagaatgtaaaaaccaatcagcatcgtccattttttcatctaattatttgttaactcttaattggccacaacttccaaccacatgacgctctttctattccctttatatattcccatctcaaatgttcttggagacacaaaatatcataaacatata

SEQ ID NO: 47 - DNA, 996 bp, Arabidopsis thaliana
  misc_feature: Ceres Promoter YP0115
gtcgattggatgatgaacattctacatatataattattatgtttaagcacttagacagcataaattctttctaattatataaatctaaccttgttacattgtacatctataaattacttgaagaaataacgagttctatttctttttaaaaattaaaaatactataccatatctcagtgattaagttgaaccaaaaggtacggaggagaaacaagcatttgattcttccttattttattttattcatctctcactaatgatggtggagaaaaaaagaaaatacctaacaaacaaatatatattgtcatacaaaaatatttctatatttttagttaattagtttatattcctcacttttcagggcttatataagaaagtgagcaaacacaaatcaaaatgcagcagcaaatactatcatcacccatctccttagttctattttataattcctcttctttttgttcatagctttgtaattatagtcttatttctctttaaggctcaataagaggaggtactattactacacttctctctacttttacttgtattttagcattaaaatcctaaaatccgttttaaattcaaaaataaacttagagatgtttaatctcgattcggtttttcggctttaggagaataattatatgaaattagtatggatatctttactagtttccattcaaatgattctgatttcaatctaatactctcactctttaattaaactatatgtagtgtaatttcacactgttaaatttctaccatgtcatgtatattagagttgcatagaaaattgtaaaacatccatttgaattcgaatgaaacaaaatgttttaaaataaaattttggtttttaaaagaaaaatctaaaactgaattatatcgtttaaccaagttgtaaaagtcataaaacgtagtatcttgtaaatcgctcttccacggtccaaatagacttctagtaataaacaagtaaaactaattttggtttcttac

SEQ ID NO: 48 - DNA, 1024 bp, Arabidopsis thaliana
  misc_feature: Ceres Promoter YP0117
gtcagtgagtcgattggatcacagtcctttatgataaaacaaactcataattattccaccgacaacatgcgttttaaattattttttcttaaattatattatattatattgatatcaacctagctaaaataattcggatggcgaaatcggacaatttttaatagaaaaaatgggtatgaagatagtctatgattccgttcttagcgactagagggacctgctcaaatctcccgggtgatacgcgatgtcaagctcaatagaaccccacaaccgacgagaccgagaaatccttgatttgggctagaagattttgaaataaatttaatatattctaagtaacttgcttaaattttttttcaaactctaaagacataactaacataaagtaaaaaaaaaaaagttaatacatgggaagaaaaaaattaaactaatgattagctctctaacgtgtttaatctcgtatcaagtttttttttaaaaattatattgctattaaaacattgtactattgtttctattttgtttagctattattcttgtgaaatgaaaagttgtgtttattcaattactaaatggcaatatttatcttggaaaactatacctctaattggattaggccctagacatcctctttagcttattgacgttaaaattattcccaaaactattaaagtttagtagtttgaaagatgcatcaagacctactcagataggtaaaagtagaaaactacagttagtgtgattatattttaaaatatataaaacaatcttattaaactaaatattcaagatatatactcaaatggaagataaaaacatttagtctgttaccactaccagcctagctagtcactaatagtcactttggaactgagtagatatttgcatcttgagttaccatggactcaaaagtccaaaaagagaccccgagtgaaaatgctaccaacttaataacaaagaagcatttacagcggtcaaaaagtatctataaatgtttacacaacagtagtcataagcaccattg

SEQ ID NO: 49 - DNA, 1000 bp, Arabidopsis thaliana
  misc_feature: Ceres Promoter YP0119
taccaaaaataaggagtttccaaaagatggttctgatgagaaacagagcccatccctctccttttccccttcccatgaaagaaatcggatggtcctccttcaatgtcctccacctactcttctcttctttctttttttctttcttattattaaccatttaattaatttccccttcaatttcagtttctagttctgtaaaaagaaaatacacatctcacttatagatatccatatctatttatatgcatgtatagagaataaaaaagtgtgagtttctaggtatgttgagtatgtgctgtttggacaattgttagatgatctgtccatttttttcttttttcttctgtgtataaatatatttgagcacaaagaaaaactaataaccttctgttttcagcaagtagggtcttataaccttcaaagaaatattccttcaattgaaaacccataaaccaaaatagatattacaaaaggaaagagagatattttcaagaacaacataattagaaaagcagaagcagcagttaagtggtactgagataaatgatatagtttctcttcaagaacagtttctcattacccaccttctcctttttgctgatctatcgtaatcttgagaactcaggtaaggttgtgaatattatgcaccattcattaaccctaaaaataagagatttaaaataaatgtttcttctttctctgattcttgtgtaaccaattcatgggtttgatatgtttcttggttattgcttatcaacaaagagatttgatcattataaagtagattaataactcttaaacacacaaagtttctttattttttagttacatccctaattctagaccagaacatggatttgatctatttcttggttatgtattcttgatcaggaaaagggatttgatcatcaagattagccttctctctctctctctagatatctttcttgaatttagaaatctttatttaattatttggtgatgtcatatataggatcaa

SEQ ID NO: 50 - DNA, 999 bp, Arabidopsis thaliana
  misc_feature: Ceres Promoter YP0120
tagtttttgatttaatctacgtttttcttaatcataaatgggtaattattagtttttgcaaaatcaaaatccaaaaattgttctaaacactgcaaccatttaaggcctatatcactcagaaaatttctggtgggagaactaatcgtttgtcctttctaaatctcacatattagaatttagaattagtgtgctacataagaatattagttcagctcggaacaactattttttggtaaaacagagaacttaaacaaatgcattattttatcaacatgcattttgaattgaatataaaatttcataattgtaaagacataaattacataaaattttacatgaaaaaatagatatagaaagaaaatgaaactaactgatgatatgctctctaaattttttaatctcataacaagaattcaaattaattagttcatatttttggttaatataacatttacctgtctaagttggaactttcatttttttctgttttgtttagtcagtattcttaatgtgaaacggaaagttgaatttattcaaacttaaattcaatagcattaattaaaggcgaaagctattatctctacatgtggttcaaactagacatccaatttaattagcttattgacgttgaaatgttttccaaaactactatagtttggcaatttgaaagatgcatcagaactactcagacaggtaaaagtagaacctctagctgtgtgaattgtatgttagtccataaagaacatcttgtaaacttcatacttaagatatatattacaatatatacttgaatggtagataaaaacgattagtctgattgctagcatactcacaactatttggaaatgagtaagatattggcattctagagttactactatggagacaaaagtcgaataaaagagacctcacgtgaaaatgttacgagctagtaaaaaaagcatttacactaacggtaaaaaaagtatctataaatgtttacacaaggtagtagtcatt

SEQ ID NO: 51 - DNA, 999 bp, Arabidopsis thaliana
  misc_feature: Ceres Promoter YP0121
ttggattttttttttgttgagtcagcagaccatctaatctctctttttccaccacagcctgctttctatgaagcatttgggcttacggttgtggaatcaatgacttgtgcactcccaacgtttgctacctgtcatggtggacccgcagagattatcgaaaacggagtttctgggttccacattgacccatatcatccagaccaggttgcagctaccttggtcagcttctttgagacctgtaacaccaatccaaatcattgggttaaaatctctgaaggagggctcaagcgaatctatgaaaggttggcccattctccttgacaggcttaacaatacaacttgtatcgcttcaacaagatgatggcttaataaggatttttgcatgtataggtacacatggaagaagtactcagagagactgcttaccctggctggagtctatgcattctggaaacatgtgtctaagctcgaaaggagagaaacacgacgttacctagagatgttttactcattgaaatttcgtgatttggttagtgtaacccactgttattcttttgatgtctacatctactttacttacattattcttttcttcggtttgcaggccaattcaatcccgctggcaacagatgagaactgatcatgacagggtaggattttatttcctgcactttctttagatcttttgtttgtgttatcttgaataaaaattgttgggttttgtttccttcagtggtttgattttggacttatttgtgttaatgttgttttggctgttctcttaatatcaataacaaataaatttactggttggtatctaagatctaacaatagttactatttttagaggtaaagacaccaaccttgttatattggtcagagagctaaaaccttgacttgttgggaaaacaaaactctaatgacagaaaatctgacatgatgccttataattcacagcctcatgttctacataaatcctaacaatagcactttgtttct

SEQ ID NO: 52 - DNA, 1004 bp, Arabidopsis thaliana
  misc_feature: Ceres Promoter YP0128
gataaactgataatggaaaagaacaaagaaaccagtttttaactatttgcatatgtaatttatttgttgcaaattatatttagttaaaatgtttcctctatttatatatatatatatcagtcaagcactatgtataagaaatgtcaatttataaatttttacatgtcctttaacagaaagaaaatgaatttttacatgtcattcatagagagtcactcgtttatttcttatatagagaataacacactcacatgcatatgcatgcaatatgatacattttatgacaaagataatcaacggaaacggtcaagacataatttgataaacaacttgcacgatgcacagatctgatcaaatatataactctttaacatatccaaaatattcaaaaagaaaaactcgatccaaactagcaacatcacgctcacgcggtaggctaaaaatttattaatctccaaaagtctttcttatgaacactgcaaacacaacaacttgaaaagtcatataggtttagatgatgacgcgtattggctatcgcttaccggagtggctcataaatacaataaacaatacgtaaaagtcaaagtcaaatatatttagtcaactataaccattaatcgggcaaaacctttagctgtcaaaacaacgtgaaaacgatatttgtatatatcatcaagaatcagtagataagagaatgatttaatcccctgactattacaattttggtgtaataaacagtctctattggtttttattctttgttttaatttctcatgacctatagagagaattaggtagtttcgaaaattggctaatcaacttttgaaaactactgtctactttgcttaaattctctacacttagtttcggataagataattgtcggactaatagttaatcccttgacaatctttgatattataaaaggtttagttaatctcttctctatataaatattcatacaccagctttcaaaaatatataatccaaacaccaaaaacaaa

SEQ ID NO: 53 - DNA, 1001 bp, Arabidopsis thaliana
  misc_feature: Ceres Promoter YP0137
gtggcacatgctgaaaccccgagcatctctccggaagacacgcgtcgttcgctccaaagaaaacagtcacagctgccggagaatctccgccgtcttcttctgccaccggaaaaactctctccaccactttcagtgcccacctcgtgttatatccactgtatcctcgtagcaccatatcagcctaataaaattttatgtatcaaattttaagacatagccgaaactacactatactagacaataataatatgatttgtttcctgaaaaattatggtttcatgagaaacattaatcatctataaaacaaattagctatggcatcgaagagttatcaatcaaaactgatgaatctttacttaatatatacaacatatctttaccttgcggcggagaagatcggcgagagaagcaccccagccaccgtcactaaaggattcttcagtgatggaatcaccaaagagaaaaaccttccgtctcatcatcttccacacaatcttcttgagaaaatctgagagataagaaaggtgtagtggttttgctgaagtgatcgtgtttgatttagtaaagaaatgctttatttattgttgggggaaacataaataaataaagtaaaagtggatgcactaaatgctttcacccactaatcaccgacctttcatggtttattgtgaaatacactcatagatagacatacaataccttatgtacgtaaataacattttatttgtcgacacttatgtaagtaacgcatagattattttctatgtgattgccactctcagactctcagtttcaaccaataataacaataactacaacaacattaatcataaacatatgctctggtttacaattaaagcttagattaagaaactgtaacaacgttacagaaaaaaaatgttatttacgttttgtaagattagtctctagaatcatcaccgttttttatatattaatgattctttcttatatataaaacctttctcgaaatacccatgaaa

SEQ ID NO: 54 - DNA, 1001 bp, Arabidopsis thaliana
  misc_feature: Ceres Promoter YP0143
atacaacagatggcagatatcgagttaaatacgtgaatcagccgttacgatattttaaaactagaaaattatttaaaaatattgcaaaataccatttaatttcattgttcataaaaaaaagaaattcaaaaacttaaaaactgattcaaaaatttggattaattctcattaacagtcttcaacactacaacaacatgtttctaatttattttatattttaataattaaacaatatatacgtctgcacattgttgctccgacataatctagtataaaaatagttgcagcatatgtgaaaagcaagcagcatttatcactcaatacttttaattttatctgttgtatgtattaaggttttgtagctttaagaaaacgcttataatataaaataacttctaaaagatatttcatgcgtatacaataaatatttgtgaaaaaacatttcgaaaacgtgtacaatatataaactattgtgttatcttttgacattcaaacaaatgttgacaatgtaattttatccatgatatgattggccaattagctgcgaggtaaaaatccgtatacgagtaaaagtaagataaaatttcgcaagaagatttttagcaggaaatctaagacaagtgtcatgaacgtgtcaatcaacaaacgaaaaggagaattatagaatccagattcgacgtaccacattaataaatatcaaaacattttatgttattttatttttgctctggcagttacactctttttcattgctccaataaaaaaatcactcgcatgcatgcatatatatacaccatagtaaactccgcctcttcttcattttaaaagtatcagtttacactgacacaatccttaactattttcctttgttcttcttcatctttattacacatttttttcaaggtaacaaataatctttttaagtcacttttatactctttaaatcttagattgatatatgaatgcatgttaatatttcaagatttataggtctaccaaac

SEQ ID NO: 55 - DNA, 1003 bp, Arabidopsis thaliana
  misc_feature: Ceres Promoter YP0144
aaacgttgcaagattattgattgtgagaaagagtgctcaaggtagtactgatttctgtaaagctcacggtggtgggaaacgatgttcttggggagatgggaaatgtgagaaaatttgctagaggaaagaagcggtttatgcgctgcgcataacactattatgtctcgggagaacaaagatggaagcaagagcggtttgattggaccgggactctttagtggccttgtttttggctctacttctgatcattctcagtctggagctagcgctgtctctgattgtactgattctgttgaacgaatacagtttgagaataggcagaagaacaagaagatgatgataccgatgcaggttctagtaccttcatcaatgaaatctccaagtaattcacatgaaggagaaacaaacatctatgacttcatggttccggaggagagagttcacggcggtgggctagtaatgtctttacttggtggctccattgatcgaaactgaaagccatttatggtaaaagtgtcacattctcagcaaaaacctgtgtaaagctgtaaaatgtgtgggaatctccgaatctgtttgtagccggttacgttatgctggatcaaaaactcaagatttgttggatattgttatgctggatcggtggtgaaaccacttcccggttgctaaataaataaacgtttttgttttataatctttttcactaaacggcagtatgggcctttagtgggcttcctttaagcgaccaatacaatcgtcgcaccggaatctactaccatttataggtttattcatgtaaaacctcggaaaatttgagagccacaacggtcaagagacaaaaacaacttgaagataaagggataaggaaggcttcctacatgatggacaacatttctttccacacaaattctcataataaaaatcttataatacaaatacttacgtcataatcattcaatctagtccccatgttttaaggtcctgtttcttgtctgatacaaat

SEQ ID NO: 56 - DNA, 1004 bp, Arabidopsis thaliana
  misc_feature: Ceres Promoter YP0156
ttggtttgcattgtgaagatttgtattaactatagaacattgaattgatggtgttaagttcttacacaagcgtgcttctcggtttgaactgtttcttttgtatgttgaatcagagcttagtttataggaaccagagtatctacttagtcattctctgatgctaagtgctaaggttctacctagttgccctctaggcccttatgttattgataacttatgaagctatttgaacacttgattcttaggagacctaagttggtacagccagatagagtgtatgttcttgttctctatgtgacaggatcaagctgccacacatagttcaagggtatgctctgtgtgggtttgctcagattgaggacaaatctatacaaggaagtagagtctttgacattttgatgttgtatgataagaagaagaaaggagagtaataaagaaagagaaaagggaaacagaaacacgtgggagaacatcccaaagaggaagcacacgcggatcttcatgcaaagctccccgattctcccatgtggtccctttctccctttgtccccctcctctttcttcttttctcattttactcctttttttaccattatacaacgaatcttttttatcataattttttggttttggtttattttccaataacactttcttggttacttcccattctcactttttcatataagaaactcactttgggaaacttatgtttgagaatgacaagtctttttagagaaagtgatgtaacaaatctaaagtgattatataataaccttgcacaatgtttttgattttttgtaagattcgaatattaggtttattattcgtagggaataaacttactttcaaaagcgttcataagttaatactttcatatatgatcataagtacggacactattgttttttgtttgtttgtgtttattctaaaagaaagtagcttttaattgaaatgtcctcggaggcacagtttaaagttcgagtgtaacagtttctaaggca

SEQ ID NO: 57 - DNA, 1000 bp, Arabidopsis thaliana
  misc_feature: Ceres Promoter YP0158
ttattagattaatagattgcattgcattgcttgtgctttcaatttacaaattgtctcccaactccatcgacacatctctttttgtgtatataagattcagacttgttatattttttttataaatatgttattagcatcttaagttaaattgattttttatatctgcattaaggattacacgactatatttgcgattgtgtgttggttaaaatataatttaggattgtctttaactacatttaggattatatgactatatttggttaaatataaaatctagctgtgattattagtattcaaaaataagtagcctaaccaattaaaacaacggctattggggcaaattagaacattttagtgtgtccaaaatataatggtcattaggtcatattcctcctagcttcatcgcagcataattgaatgattgccttatttagaagagcttttccactttcccaaaatctaggtgggatctttttgttttgaccttcatttttcttgtttaccatttttagctaaattatttacgattacaaaagatatcaaaagttggatcataatacaatttatagacttactgtagaaaattcgtatgtacaagtacaacaaattcttcataataaattttgaaaattctattacaaatgttgtaagaaatagaatttgaaatatatataaactaaggagaaaaaaaaagagaacatgcattgctctagtcagagtggaccaacatcaacgagataagataacataaaaaccaactcaccataactaaaaacatcccaagagatccaacgattcatatcaaacacaaaaacatcgaacgatcagatttaaaccatctctggtatctccaaaacacaaacacttttttttttcttttgtctgaatggaacaaaagcatgcgacatctctgtgtctttatcttctctctcctcttcttgaaaaactgaacctttaattctttcttcacatctcctttagctttctgaagctgcta

SEQ ID NO: 58 - DNA, 1005 bp, Arabidopsis thaliana
  misc_feature: Ceres Promoter YP0188
gattggtatgaaatttcggagaccaacaaaaaaaactttattgagcttggagtgaagctatatatatggggcaagatcataatatgtttatatcggccttttcgttaactgaaaataatagttttgagaaatatatcaaatggtaaacagacatcatctttgaaaaataccatcaatgaagttaatattgttattggcatatggtttacccatcttaattttaatgcaaccaaacaaacaagaaacaaaaactgtataagatacaaggtgttttacgattttccgtcttaaaaccgaaatatttttgttcctacgactttaaacggactttgcttaagttgtgtgcatgtaagctcgtcgtccctcgattgtcatcaacattcaccaatatcagcctctatcacacgagtgaaggtggtgattcggcttaatgaaaacagagaaatatttcaatatgattcctattaaattttaaatcttttttctcaatctctagattttcattaaaagcatcatgatttttttccactatgttcatatatctctatcacagttttaggtacattgtagaaattggataagatacgtcatacgtctaacatgaatttggtctagcaaggaaggtttgagataataagtgaaaagaaaacacaagataataaattataatttataaatgctttatagtattgaaaaataagatgattttttttttttttaataccggattggctgatccacttatgatgactcaaatgttattaagtttcaagacaatttatgatgacacaaatcacaatgagtcaatagtagccacgaagccagaaaaaaaaaatgtactacaaaaagataatgatagtacaaaatgatacgtcgtactgccacatgtacgacacaactcgattaccaaaaagcagagccatccaaccataaaactcaaaacacacagattccactggcgtgtgctctcctcacttcactcgtccttgaaacttgaggtactga

SEQ ID NO: 59 - DNA, 1002 bp, Arabidopsis thaliana
  misc_feature: Ceres Promoter YP0190
taaatagtgacattggtaagaagaaaaaaaacactattaaatagtgaaaaaatggtttataactctcttaattaacattacttattattgctagcacctaaaatctcccacaaaatatttgttgtaaaacacaaatttacaaaatgattttgtttttaaattagtaacacatgttcatatatacgttaataagaacataccctatatgattttatataaaaaaatttctttgagacgtcttattcttttttctttaataatatgcaattgtgagagtttggatttgaatggtagcattagaagcaaacttgaaccaaacatatttcatgaagtcaaacttgaaccaatgtgatcactaatcacagtgttcgcagtgtaaggcatcagaaaatagaagaagggacatagctatgaatcatataatcttgacacatgttttataggttttaggtgtgtatgctaacaaaaaatgagacagctttcttctaatagacttaatatttgggctaaatgtaccacagttgtgaatttcttacaaaaatgggccgagctacaaaaaactacaggcccactctcaactcttatcaaacgacagcgttttacttttttaaaagcacacactttttgtttggtgtcggtgacggtgagtttcgtccgctcttcctttaaattgaagcaacggttttgatccgatcaaatccaacggtgctgattacacaaagcccgagacgaaaacgttgactattaagttaggttttaatctcagccgttaatctacaaatcaacggttccctgtaaaacgaatcttccttccttcttcacttccgcgtcttctctctcaatcacctcaaaaaaatcgatttcatcaaaatattcacccgcccgaatttgactctccgatcatcgtctccgaatctagatcgacgagatcaaaaccctagaaatctaaatcggaatgagaaattgattttgatacgaattagggatctgtgtgttgaggac

SEQ ID NO: 60 - DNA, 995 bp, Arabidopsis thaliana
  misc_feature: Ceres Promoter YP0212
agtcgattggtacactcttaatttaattagagtaagagatcaacaaaaatatagaattttctttatatcgaagtgctacgaccttatatatatagaaaaaaaagcataggtgaatctctaaattgagattgtgctgtagtaaacatattaagtttttagtttttttaagaaatgaatctttttgttgattaattcaaactagtagtcattaagattccggagattccaatttagaaaagtcaaagattcaaagaacaagtccaggtccacatgttgaatccgattcatcatccactcatccttcatatcttcctccaccgtctccgcccaaaaaatcaataacaataaaaaatcctaaaaaaacatatttgattttgaaaaaactttatcatatattatattaattaaatagttatccgatgactcatcctatggtcagggccttgctgtctctgacgtccttaattatcattatttttaaatttgtctctctcagaaaattacgccacaatcttcctctttcccttttccgaaaacagctaatatttgtggacctaaactaaataacgtagcctctagattttatataattactaatactatatgctactacttgttattatttactccaatcatatatgataccaatcaagaatcactacataagtagaaaactttgcaatgagtccattaattaaaattaagaataaacttaaaattttatggtattttaagattccctttggattgtaatgacaagaaatcagcaaattagtcgtaactcgtaagaataaacaagatcaatttttactttctttacaaagattccgttgtaattttagaaatttttttttgtcactgtttttttatagattaatttatctgcatcaatccgattaagaagtgtacacatgggcatctatatatatctaacaggtaaaacgtgtatgtacatgcataaggttttacgtgcttctataaatatatgtggcagt

SEQ ID NO: 61 - DNA, 1024 bp, Arabidopsis thaliana
  misc_feature: Ceres Promoter YP0214
ccagtcgattggcgcctcgcatgcctatcatatttaaccgtcaataatggatttggcggttttggtaggccgggtcaaccggattaaaagaaaacggtttggagtccttccttgcaattgaattttcacacattcgggttttgtgatttctctgtcataatgggcccggcacatatggttcataacccatgtgggcctatggtataatttttccaattaaaactattgttaggtcgataaaacaaaaaacaataaaaacgagtggaatacacataccaaaaagaatgtgatgaacattagtaattttattttgatggttaatgaaaaacaaaataaatgcatcttggcatcttccgttggaaagcgcaaatagggcagattttcagacagatatcactatgatggggggtgagagaaagaaaacgaggcgtacctaatgtaacactacttaattagtcgttagttataggactttttttttgtttgggcctagttataggatcataaggtaaaaatgaagaatgaatattagattagtaggagctaatgatggagttaagtatgcacgtgtaagaactgggaagtgaaacctcctgtatggtgaagaaactatacaacaaagccctttgttggtgtatacgtattaatttttattcttttatcacaagcgatacgtatcttaagacataataaatatatatcttactcataataaatatcttaagatatatatacagtatacacctgtatatatataataaataggcatatagtagaaattaatatgagttgttgttgttgcaaatatataaatcaatcaaaagatttaaaacccaccattcaatcttggtaagtaacgaaaaaaaagggaagcaagaagaaccacagaaaagggggctaacaactagacacgtagatcttcatctgcccgtccatctaacctaccacactctcatcttctttttcccgtgtcagtttgttatataagctctcactctccggtatatttccccattgcactgga

SEQ ID NO: 62 - DNA, 911 bp, Arabidopsis thaliana
  misc_feature: Ceres Promoter YP0263
atctagctgtggattccaccaaaattctggcagggccatgatctaaaaactgagactgcgcgtgttgttttgcagtgatttgtatttcatatttgcaccatcctacacagtccacttggtatcgtaaccaaacataaggagaacctaattacattattgttttaatttcgtcaaactggtttttaccttttagttacatagttgattcttcatttgttttagtagttatggagcacaataatgtgcaacaaagaaagatcatagtggattaatatgttgagaggtcagaaattcttggttaacaaaaaaaagttacaaggactgagattttgggtgggagaaagccatagcttttaaaacatgattgaacttaaaagtgatgttatggtttgaggggaaaaaggttgatgtcaactaagatagttgaagtaatgtcttaaactaaagtaaaccaccggtccaaccgtggtccggaagcatctctggtatgatttatcctaaaaatcaaaatagtagaaacatactttaaatatatacattgatcggacgaaaattgtaaactagtatagtttcaaaaactagttgaacaggttatgtaccttaaacatttatttcaaacttaaacactaaagaacatatatgaatagaagtttatataaattactatatatctaccataaatctcttataattatgatgtcacgatgaggaagtgttgaaacgttaaaatgccaaaatataagcatgcgacggaattttggcagaagattgtagagttgtaatctgtcgcaatcattactcgtgctagcatttttcattttcccttcatttgtggataacgcacgatataacattctacacaccaacaagattctataaaaacgcaaaggttgtctccatagaatatcgtc

SEQ ID NO: 63 - DNA, 999 bp, Arabidopsis thaliana
  misc_feature: Ceres Promoter YP0275
aaacattaatatgtagtaactatgggcgtatgctttactttttaaaatgggcctatgctataattgaatgacaaggattaaacaactaataaaattgtagatgggttaagatgacttatttttttacttaccaatttataaatgggcttcgatgtactgaaatatatcgcgcctattaacgaggccattcaacgaatgttttaagggccctatttcgacattttaaagaacacctaggtcatcattccagaaatggatattataggatttagataatttcccacgtttggtttatttatctattttttgacgttgaccaacataatcgtgcccaaccgtttcacgcaacgaatttatatacgaaatatatatatttttcaaattaagataccacaatcaaaacagctgttgattaacaaagagattttttttttttggttttgagttacaataacgttagaggataaggtttcttgcaacgattaggaaatcgtataaaataaaatatgttataattaagtgttttattttataatgagtattaatataaataaaacctgcaaaaggatagggatattgaataataaagagaaacgaaagagcaattttacttctttataattgaaattatgtgaatgttatgtttacaatgaatgattcatcgttctatatattgaagtaaagaatgagtttattgtgcttgcataatgacgttaacttcacatatacacttattacataacatttatcacatgtgcgtctttttttttttttactttgtaaaatttcctcacttttaagacttttataacaattactagtaaaataaagttgcttggggctacaccctttctccctccaacaactctatttatagataacattatatcaaaatcaaaacatagtccctttcttctataaaggttttttcacaaccaaatttccattataaatcaaaaaataaaaacttaattagtttttacagaagaaaagaaaaca

SEQ ID NO: 64 - DNA, 981 bp, Arabidopsis thaliana
  misc_feature: Ceres Promoter YP0285
gggattatatatgatagacgattgtatttgcgggacattgagatgtttccgaaaatagtcatcaaatatcaaaccagaatttgatgtgaaaacactaattaaaacatataattgacaactagactatatcatttgttaagttgagcgttgaaagaaaatgaaagagtgtagactgtagtacgtatgagtttcccaaaagatggtgcttgaatattattgggaagagactttggttggttcggttgaatgaagatttttacctgccatgttgatagagaaaggcaaataaatgtaggggtcgatgtctaacgtaaagactggatcaaccaagagtcctcctcctcgtcttcaccaaaaaaaaagagtcctcctcgtggaaacttatttcttctccagccaagatctcatctcatctcttcactctatgaaatataaaggaatcttatggtttttctaaaaactatagtacgtctatataccaaaggaaacaatataaaatcagttaatctgataaattttgagtaaataataaagttaactttgtacttacctatatcaaactaattcacaaaataaagtaataataacaaagaatttttagtagatccacaatatacacacacactatgagaaatcataatagagaattttaatgattttgtctaactcatagcaacaagtcgctttggccgagtggttaaggcgtgtgcctgctaagtacatgggctctgcccgcgagagttcgaatctctcaggcgacgtttcttttgttttcggccataaaggaaaaagcccaattaacacgtctcgcttataagcccataaagcaaacaatgggctgtctctgtctcactcacacacgcgttttcctactttttgactatttttataaccggcgggtctgacttaattagggttttctttaataatcagacactctctcactcgtttcgtcaacattgaacacagacaaaaccgcgt

SEQ ID NO: 65 - DNA, 996 bp, Arabidopsis thaliana
  misc_feature: Ceres Promoter YP0286
gaaaacaatcataggttacgctattatcatcgaaaggtatgtgatgcatattcccattgaaccagatttccatatattttatttgtaaagtgataatgaatcacaagatgattcaatattaaaaatgggtaactcactttgacgtgtagtacgtggaagaatagttagctatcacgcatacatatatctatgaataagtgtgtatgacataagaaactaaaatatttacctaaagtccagttactcatactgatttcatgcatatatgtattatttatttatttttaataaagaagcgattggtgttttcatagaaatcatgatagattgataggtatttcagttccacaaatctagatctgtgtgctatacatgcatgtattaattttttccccttaaatcatttcagttgataatattgctctttgttccaactttagaaaaggtatgaaccaacctgacgattaacaagtaaacattaattaatctttatatgagataaaaccgaggatatatatgattgtgttgctgtctattgatgatgtgtcgatattatgcttgttgtaccaatgctcgagccgagcgtgatcgatgccttgacaaactatatatgtttcccgaattaattaagttttgtatcttaattagaataacatttttatacaatgtaatttctcaagcagacaagatatgtatcctatattaattactatatatgaattgccgggcacctaccaggatgtttcaaatacgagagcccattagtttccacgtaaatcacaatgacgcgacaaaatctagaatcgtgtcaaaactctatcaatacaataatatatatttcaagggcaatttcgacttctcctcaactcaatgattcaacgccatgaatctctatataaaggctacaacaccacaaaggatcatcagtcatcacaaccacattaactcttcaccactatctctcaatctctcgtttcatttcttgacgcgtgaaaa

SEQ ID NO: 66 - DNA, 1000 bp, Arabidopsis thaliana
  misc_feature: Ceres Promoter YP0337
taatttttttatttttggaactaacacttattagtttaggtttccatcacctatttaattcgtaattcttatacatgcatataatagagatacatatatacaaatttatgatcatttttgcacaacatgtgatctcattcattagtatgcattatgcgaaaacctcgacgcgcaaaagacacgtaatagctaataatgttactcatttataatgattgaagcaagacgaaaacaacaacatatatatcaaattgtaaactagatatttcttaaaagtgaaaaaaaacaaagaaatataaaggacaattttgagtcagtctcttaatattaaaacatatatacataaataagcacaaacgtggttacctgtcttcatgcaatgtggactttagtttatctaatcaaaatcaaaataaaaggtgtaatagttctcgtcatttttcaaattttaaaaatcagaaccaagtgatttttgtttgagtattgatccattgtttaaacaatttaacacagtatatacgtctcttgagatgttgacatgatgataaaatacgagatcgtctcttggttttcgaattttgaactttaatagttttcttttttagggaaactttaatagttgtttatcataagattagtcacctaatggttacgttgcagtaccgaaccaattttttacccttttttctaaatgtggtcgtggcataatttccaaaagagatccaaaacccggtttgctcaactgataagccggtcggttctggtttgaaaaacaagaaataatctgaaagtgtgaaacagcaacgtgtctcggtgtttcatgagccacctgccacctcattcacgtcggtcattttgtcgtttcacggttcacgctctagacacgtgctctgtccccaccatgactttcgctgccgactcgcttcgctttgcaaactcaaacatgtgtgtatatgtaagtttcatcctaataagcatctcttaccacattaattaaaaa

SEQ ID NO: 67 - DNA, 1000 bp, Arabidopsis thaliana
  misc_feature: Ceres Promoter YP0356
ttagttcattgaaacgtcaactttttacttgcaaccactttgtaggaccattaactgcaaaataagaattctctaagcttcacaaggggttcgtttggtgctataaaaacattgttttaagaactggtttactggttctataaatctataaatccaaatatgaagtatggcaataataataacatgttagcacaaaaaatactcattaaattcctacccaaaaaaaatctttatatgaaactaaaacttatatacacaataatagtgatacaaagtaggtcttgatattcaactattcgggattttctggtttcgagtaattcgtataaaaggtttaagatctattatgttcactgaaatcttaactttgttttgtttccagttttaactagtagaaattgaaatttttaaaaattgttacttacaataaaatttgaatcaatatccttaatcaaaggatcttaagactagcacaattaaaacatataacgtagaatatctgaaataactcgaaaatatctgaactaagttagtagttttaaaatataatcccggtttggaccgggcagtatgtacttcaatacttgtgggttttgacgattttggatcggattgggcgggccagccagattgatctattacaaatttcacctgtcaacgctaactccgaacttaatcaaagattttgagctaaggaaaactaatcagtgatcacccaaagaaaacattcgtgaataattgtttgctttccatggcagcaaaacaaataggacccaaataggaatgtcaaaaaaaagaaagacacgaaacgaagtagtataacgtaacacacaaaaataaactagagatattaaaaacacatgtccacacatggatacaagagcatttaaggagcagaaggcacgtagtggttagaaggtatgtgatataattaatcggcccaaatagattggtaagtagtagccgtctatatcatccatactcatcataacttcaacct

SEQ ID NO: 68 - DNA, 1000 bp, Arabidopsis thaliana
  misc_feature: Ceres Promoter YP0374
aagacacccgtaaatgttgtcatgtagaagaaactagaaacgttaaacgcatcaaatcaagaaattaaattgaaggtaatttttaacgccgcctttcaaatattcttcctaggagaggctacaagacgcgtatttctttcgaattctccaaaccattaccattttgatatataataccgacatgccgttgataaagtttgtatgcaaatcgttcattgggtatgagcaaatgccatccattggttcttgtaattaaatggtccaaaaatagtttgttcccactactagttactaatttgtatcactctgcaaaataatcatgatataaacgtatgtgctatttctaattaaaactcaaaagtaatcaatgtacaatgcagagatgaccataaaagaacattaaaacactacttccactaaatctatggggtgccttggcaaggcaattgaataaggagaatgcatcaagatgatatagaaaatgctattcagtttataacattaatgttttggcggaaaattttctatatattagacctttctgtaaaaaaaaaaaaatgatgtagaaaatgctattatgtttcaaaaatttcgcactagtataatacggaacattgtagtttacactgctcattaccatgaaaaccaaggcagtatataccaacattaataaactaaatcgcgatttctagcacccccattaattaattttactattatacattctctttgcttctcgaaataataaacttctctatatcattctacataataaataagaaagaaatcgacaagatctaaatttagatctattcagctttttcgcctgagaagccaaaattgtgaatagaagaaagcagtcgtcatcttcccacgtttggacgaaataaaacataacaataataaaataataaatcaaatatataaatccctaatttgtctttattactccacaattttctatgtgtatatatatacccacctctctcttgtgtatttg

SEQ ID NO: 69 - DNA, 998 bp, Arabidopsis thaliana
  misc_feature: Ceres Promoter YP0377
tataaaccattcctataacaccatatttaaacataacaatgaattgcttggatttcaaactttattaaatttggattttaaattttaatttgattgaattatacccccttaattggataaattcaaatatgtcaactttttttttgtaagatttttttatggaaaaaaaaattgattattcactaaaaagatgacaggttacttataatttaatatatgtaaaccctaaaaagaagaaaatagtttctgttttcactttaggtcttattatctaaacttctttaagaaaatcgcaataaattggtttgagttctaactttaaacacattaatatttgtgtgctatttaaaaaataatttacaaaaaaaaaaacaaattgacagaaaatatcaggttttgtaataagatatttcctgataaatatttagggaatataacatatcaaaagattcaaattctgaaaatcaagaatggtagacatgtgaaagttgtcatcaatatggtccacttttctttgctctataacccaaaattgaccctgacagtcaacttgtacacgcggccaaacctttttataatcatgctatttatttccttcatttttattctatttgctatctaactgatttttcattaacatgataccagaaatgaatttagatggattaattcttttccatccacgacatctggaaacacttatctcctaattaaccttactttttttttagtttgtgtgctccttcataaaatctatattgtttaaaacaaaggtcaataaatataaatatggataagtataataaatctttattggatatttctttttttaaaaaagaaataaatcttttttggatattttcgtggcagcatcataatgagagactacgtcgaaaccgctggcaaccacttttgccgcgtttaatttctttctgaggcttatataaatagatcaaaggggaaagtgagatataatacagacaaaacaagagaaaaga

SEQ ID NO: 70 - DNA, 999 bp, Arabidopsis thaliana
  misc_feature: Ceres Promoter YP0380
acaagtaccattcacttttttacttttcaatgtatacaatcatcatgtgataaaaaaaaaaatgtaaccaatcaacacactgagatacggccaaaaaatggtaatacataaatgtttgtaggttttgtaatttaaatactttagttaagttatgattttattatttttgcttatcacttatacgaaatcatcaatctattggtatctcttaatcccgctttttaatttccaccgcacacgcaaatcagcaaatggttccagccacgtgcatgtgaccacatattgtggtcacagtactcgtcctttttttttcttttgtaatcaataaatttcaatcctaaaacttcacacattgagcacgtcggcaacgttagctcctaaatcataacgagcaaaaaagttcaaattagggtatatgatcaattgatcatcactacatgtctacataattaatatgtattcaaccggtcggtttgttgatactcatagttaagtatatatgtgctaattagaattaggatgaatcagttcttgcaaacaactacggtttcatataatatgggagtgttatgtacaaaatgaaagaggatggatcattctgagatgttatgggctcccagtcaatcatgttttgctcgcatatgctatcttttgagtctcttcctaaactcatagaataagcacgttggttttttccaccgtcctcctcgtgaacaaaagtacaattacattttagcaaattgaaaataaccacgtggatggaccatattatatgtgatcatattgcttgtcgtcttcgttttcttttaaatgtttacaccactacttcctgacacgtgtccctattcacatcatccttgttatatcgttttacttataaaggatcacgaacaccaaaacatcaatgtgtacgtcttttgcataagaagaaacagagagcattatcaattattaacaattacacaagacagcgagattgtaaaagagtaagagagagag

SEQ ID NO: 71 - DNA, 1000 bp, Arabidopsis thaliana
  misc_feature: Ceres Promoter YP0381
cacggtcaaagtattgctaacatggtcattacattgaaaaagaaaattaattgtctttactcatgtttattctatacaaataaaaatattaaccaaccatcgcactaacaaaatagaaatcttattctaatcacttaattgttgacaattaaatcattgaaaaatacacttaaatgtcaaatattcgttttgcatacttttcaatttaaatacatttaaagttcgacaagttgcgtttactatcatagaaaactaaatctcctaccaaagcgaaatgaaactactaaagcgacaggcaggttacataacctaacaaatctccacgtgtcaattaccaagagaaaaaaagagaagataagcggaacacgtggtagcacaaaaaagataatgtgatttaaattaaaaaacaaaaacaaagacacgtgacgacctgacgctgcaacatcccaccttacaacgtaataaccactgaacataagacacgtgtacgatcttgtctttgttttctcgatgaaaaccacgtgggtgctcaaagtccttgggtcagagtcttccatgattccacgtgtcgttaatgcaccaaacaagggtactttcggtattttggcttccgcaaattagacaaaacagctttttgtttgattgatttttctcttctctttttccatctaaattctctttgggctcttaatttctttttgagtgttcgttcgagatttgtcggagattttttcggtaaatgttgaaattttgtgggatttttttttatttctttattaaacttttttttattgaatttataaaaagggaaggtcgtcattaatcgaagaaatggaatcttccaaaatttgatattttgctgttttcttgggatttgaattgctctttatcatcaagaatctgttaaaatttctaatctaaaatctaagttgagaaaaagagagatctctaatttaaccggaattaatattctccgaccgaagttattatgttgcaggct

SEQ ID NO: 72 - DNA, 999 bp, Arabidopsis thaliana
  misc_feature: Ceres Promoter YP0384
tttaaaaaattggataaaacaccgataaaaattcacatttgcaaattttattcagtcggaatatatatttgaaacaagttttgaaatccattggacgattaaaattcattgttgagaggataaatatggatttgttcatctgaaccatgtcgttgattagtgattgactaccatgaaaaatatgttatgaaaagtataacaacttttgataaatcacatttattaacaataaatcaagacaaaatatgtcaacaataatagtagtagaagatattaattcaaattcatccgtaacaacaaaaaatcataccacaattaagtgtacagaaaaaccttttggatatatttattgtcgcttttcaatgattttcgtgaaaaggatatatttgtgtaaaataagaaggatcttgacgggtgtaaaaacatgcacaattcttaatttagaccaatcagaagacaacacgaacacttctttattataagctattaaacaaaatcttgcctattttgcttagaataatatgaagagtgactcatcagggagtggaaaatatctcaggatttgcttttagctctaacatgtcaaactatctagatgccaacaacacaaagtgcaaattcttttaatatgaaaacaacaataatatttctaatagaaaattaaaaagggaaataaaatatttttttaaaatatacaaaagaagaaggaatccatcatcaaagttttataaaattgtaatataatacaaacttgtttgcttccttgtctctccctctgtctctctcatctctcctatcttctccatatatacttcatcttcacacccaaaactccacacaaaatatctctccctctatctgcaaattttccaaagttgcatcctttcaatttccactcctctctaatataattcacattttcccactattgctgattcatttttttttgtgaattatttcaaacccacataaaaaaatctttgtttaaatttaaaacca

SEQ ID NO: 73 - DNA, 998 bp, Arabidopsis thaliana
  misc_feature: Ceres Promoter YP0385
actcaacaataggacaagccaaaaaaattccaattattgtgttactctattcttctaaatttgaacactaatagactatgacatatgagtatataatgtgaagtcttaagatattttcatgtgggagatgaataggccaagttggagtctgcaaacaagaagctcttgagccacgacataagccaagttgatgaccgtaattaatgaaactaaatgtgtgtggttatatattagggacccatggccatatacacaatttttgtttctgtcgatagcatgcgtttatatatatttctaaaaaaactaacatatttactggatttgagttcgaatattgacactaatataaactacgtaccaaactacatatgtttatctatatttgattgatcgaagaattctgaactgttttagaaaatttcaatacacttaacttcatcttacaacggtaaaagaaatcaccactagacaaacaatgcctcataatgtctcgaaccctcaaactcaagagtatacattttactagattagagaatttgatatcctcaagttgccaaagaattggaagcttttgttaccaaacttagaaacagaagaagccacaaaaaaagacaaagggagttaaagattgaagtgatgcatttgtctaagtgtgaaaggtctcaagtctcaactttgaaccataataacattactcacactccctttttttttctttttttttcccaaagtaccctttttaattccctctataacccactcactccattccctctttctgtcactgattcaacacgtggccacactgatgggatccacctttcctcttacccacctcccggtttatataaacccttcacaacacttcatcgctctcaaaccaactctctcttctctcttctctcctctcttctacaagaagaaaaaaaacagagcctttacacatctcaaaatcgaacttactttaaccaccaaatactgattgaacacacttgaaa

SEQ ID NO: 74 - DNA, 1000 bp, Arabidopsis thaliana
  misc_feature: Ceres Promoter YP0396
catagtaaaagtgaatttaatcatactaagtaaaataagataaaacatgttatttgaatttgaatatcgtgggatgcgtatttcggtatttgattaaaggtctggaaaccggagctcctataacccgaataaaaatgcataacatgttcttccccaacgaggcgagcgggtcagggcactagggtcattgcaggcagctcataaagtcatgatcatctaggagatcaaattgtatgtcggccttctcaaaattacctctaagaatctcaaacccaatcatagaacctctaaaaagacaaagtcgtcgctttagaatgggttcggtttttggaaccatatttcacgtcaatttaatgtttagtataatttctgaacaacagaattttggatttatttgcacgtatacaaatatctaattaataaggacgactcgtgactatccttacattaagtttcactgtcgaaataacatagtacaatacttgtcgttaatttccacgtctcaagtctataccgtcatttacggagaaagaacatctctgtttttcatccaaactactattctcactttgtctatatatttaaaattaagtaaaaaagactcaatagtccaataaaatgatgaccaaatgagaagatggttttgtgccagattttaggaaaagtgagtcaaggtttcacatctcaaatttgactgcataatcttcgccattaacaacggcattatatatgtcaagccaattttccatgttgcgtacttttctattgaggtgaaaatatgggtttgttgattaatcaaagagtttgcctaactaatataactacgactttttcagtgaccattccatgtaaactctgcttagtgtttcatttgtcaacaatattgtcgttactcattaaatcaaggaaaaatatacaattgtataattttcttatattttaaaattaattttgatgtattacccctttataaataggctatcgctacaacaccaataac

SEQ ID NO: 75 - DNA, 1514 bp, Arabidopsis thaliana
  misc_feature: Ceres Promoter p13879
tttcgatcctcttcttttttaggtttcttgatttgatgatcgccgccagtagagccgtcgtcggaagtttcagagattaaaaccatcaccgtgtgagttggtagcgaattaacggaaagtctaagtcaagattttttaaaaagaaatttatgtgtgaaaagaagccgttgtgtatatttatataatttagaaaatgtttcatcattttaattaaaaaattaataatttgtagaagaaagaagcattttttatacataaatcatttaccttctttactgtgtttttcttcacttacttcatttttacttttttacaaaaaagtgaaaagtaaattacgtaattggtaacataaattcactttaaatttgcatatgttttgttttcttcggaaactatatcgaaaagcaaacggaaagaacttcacaaaaaaccctagctaactaaagacgcatgtgttcttcttattcttcatatatcctctgtttcttgtgttctgttttgagtcttacattttcaatatctgactctgattactatatctaaaagggaacatgaagaacttgagaccatgttaaactgtacaatgccttcaaacatggctaactaaagatacattagatggctttacagtgtgtaatgcttattatctttaggttttttaaatcccttgtattaagttatttaccaaattatgttcttgtactgcttattggcttggttgttgtgtgctttgtaaacaacacctttggctttatttcatcctttgtaaacctactggtctttgttcagctcctcttggaagtgagtttgtatgcctggaacgggttttaatggagtgtttatcgacaaaaaaaaaatgtagcttttgaaatcacagagagtagttttatattcaaattacatgcatgcaactaagtagcaacaaagttgatatggccgagttggtctaaggcgccagattaaggttctggtccgaaagggcgtgggttcaaatcccactgtcaacattctctttttctcaaattaatatttttctgcctcaatggttcaggcccaattatactagactactatcgcgactaaaatagggactagccgaattgatccggcccagtatcagttgtgtatcaccacgttatttcaaatttcaaactaagggataaagatgtcatttgacatatgagatatttttttgctccactgagatatttttctttgtcccaagataaaatatcttttctcgcatcgtcgtctttccatttgcgcattaaaccaaaaagtgtcacgtgatatgtccccaaccactacgaattttaactacagatttaaccatggttaaaccagaattcacgtaaaccgactctaaacctagaaaatatctaaaccttggttaatatctcagcccccttataaataacgagacttcgtctacatcgttctacacatctcactgctcactactctcactgtaatcccttagatcttcttttcaaatttcaccattgcactggatg

SEQ ID NO: 76 - DNA, 1954 bp, Arabidopsis thaliana
  misc_feature: Ceres Promoter p326
gtgggtaaaagtatccttctttgtgcatttggtatttttaagcatgtaataagaaaaaccaaaatagacggctggtatttaataaaaggagactaatgtatgtatagtatatgatttgtgtggaatataataaagttgtaaaatatagatgtgaagcgagtatctatcttttgactttcaaaggtgatcgatcgtgttctttgtgatagttttggtcgtcggtctacaagtcaacaaccaccttgaagttttcgcgtctcggtttcctcttcgcatctggtatccaatagcatacatataccagtgcggaaaatggcgaagactagtgggcttgaaccataaggtttggccccaatacggattccaaacaacaagcctagcgcagtcttttgggatgcataagactaaactgtcgcagtgatagacgtaagatatatcgacttgattggaatcgtctaagctaataagtttaccttgaccgtttatagttgcgtcaacgtccttatggagattgatgcccatcaaataaacctgaaaatccatcaccatgaccaccataaactcccttgctgccgctgctttggcttgagcaaggtgtttccttgtaaagctccgatctttggataaagtgttccactttttgcaagtagctctgacccctctcagagatgtcaccggaatcttagacagaacctcctctgccaaatcacttggaagatcggacaatgtcatcatttttgcaggtaatttctccttcgttgctgctttggcttgagcacggtgcttctttgtaaagctccgatctttggataagagcggatcggaatcctctaggaggtgccagtcccttgacctattaatttatagaaggttttagtgtattttgttccaatttcttctctaacttaacaaataacaactgcctcatagtcatgggcttcaaattttatcgcttggtgtatttcgttatttgcaaggccttggcccattttgagcccaataactaaatctagccttttcagaccggacatgaacttcgcatattggcgtaactgtgcagttttacctttttcggatcagacaagatcagatttagaccacccaacaatagtcagtcatatttgacaacctaagctagccgacactactaaaaagcaaacaaaagaagaattctatgttgtcattttaccggtggcaagtggacccttctataaaagagtaaagagacagcctgtgtgtgtataatctctaattatgttcaccgacacaatcacacaaacccttctctaatcacacaacttcttcatgatttacgacattaattatcattaactctttaaattcactttacatgctcaaaaatatctaatttgcagcattaatttgagtaccgataactattattataatcgtcgtgattcgcaatcttcttcattagatgctgtcaagttgtactcgcacgcggtggtccagtgaagcaaatccaacggtttaaaaccttcttacatttctagatctaatctgaaccgtcagatatctagatctcattgtctgaacacagttagatgaaactgggaatgaatctggacgaaattacgatcttacaccaaccccctcgacgagctcgtatatataaagcttatacgctcctccttcaccttcgtactactactaccaccacatttctttagctcaaccttcattactaatctccttttaaggtatgttcacttttcttcgattcatactttctcaagattcctgcatttctgtagaatttgaaccaagtgtcgatttttgtttgagagaagtgttgatttatagatctggttattgaatctagattccaatttttaattgattcgagtttgttatgtgtgtttatactacttctcattgatcttgtttgatttctctgctctgtattaggtttctttcgtgaatcagatcggaa

SEQ ID NO: 77 - DNA, 2016 bp, Arabidopsis thaliana
  misc_feature: Ceres Promoter p32449
gatcggccttcttcaggtcttctctgtagctctgttacttctatcacagttatcgggtatttgagaaaaaagagttagctaaaatgaatttctccatataatcatggtttactacaggtttacttgattcgcgttagctttatctgcatccaaagttttttccatgatgttatgtcatatgtgataccgttactatgtttataactttatacagtctggttcactggagtttctgtgattatgttgagtacatactcattcatcctttggtaactctcaagtttaggttgtttgaattgcctctgttgtgatacttattgtctattgcatcaatcttctaatgcaccaccctagactatttgaacaaagagctgtttcattcttaaacctctgtgtctccttgctaaatggtcatgctttaatgtcttcacctgtctttctcttctatagatatgtagtcttgctagatagttagttctacagctctcttttgtagtcttgttagagagttagttgagatattacctcttaaaagtatccttgaacgctttccggttatgaccaatttgttgtagctccttgtaagtagaacttactgggaccagcgagacagtttatgtgaatgttcatgcttaagtgtcgaacgtatctatctctactatagctctgtagtcttgttagacagttagttttatatctccatttttttgtagtcttgctagttgagatattacctcttctcttcaaagtatccttgaacgctcaccggttatgaaatctctacactatagctctgtagtcttgctagatagttagttctttagctctctttttgtagcctagttctttagctctccttttgtagccttgctacagagtaagatgggatattacctccttgaacgctctccggttatgaccaatttgttgtagctccttgtaagtagaacttaggatagagtgagtcaactttaagaaagaacctagtatgtggcataaccagattgcaggctctgtctcggctacagtaacgtaactctatagctctttgttttgttcagaaagaaccagtgattggatgattcgtccttagaaactggacctaacaacagtcattggctttgaaatcaagccacaacaatgcctatatgaaccgtccatttcatttatccgtttcaaaccagcccattacatttcgtcccattgataaccaaaagcggttcaatcagattatgttttaattttaccaaattctttatgaagtttaaattatactcacattaaaaggattattggataatgtaaaaattctgaacaattactgattttggaaaattaacaaatattctttgaaatagaagaaaaagcctttttccttttgacaacaacatataaaatcatactcccattaaaaagattttaatgtaaaattctgaatataagatattttttacaacaacaaccaaaaatatttatttttttccttttttacagcaacaagaaggaaaaacttttttttttgtcaagaaaaggggagattatgtaaacagataaaacagggaaaataactaaccgaactctcttaattaacatcttcaaataaggaaaattatgatccgcatatttaggaagatcaatgcattaaaacaacttgcacgtggaaagagagactatacgctccacacaagttgcactaatggtacctctcacaaaccaatcaaaatactgaataatgccaacgtgtacaaattagggttttacctcacaaccatcgaacattctcgaaacattttaaacagcctggcgccatagatctaaactctcatcgaccaatttttgaccgtccgatggaaactctagcctcaacccaaaactctatataaagaaatcttttccttcgttattgcttaccaaatacaaaccctagccgccttattcgtcttcttcgttctctagttttttcctcagtctctgttcttagatcccttgtagtttccaaatcttccgataaggcct

SEQ ID NO: 78 - DNA, 857 bp, Arabidopsis thaliana
  misc_feature: Ceres Promoter PD1367
  misc_feature (116)..(116): n is a, c, t, g, unknown, or other
  misc_feature (136)..(136): n is a, c, t, g, unknown, or other
  misc_feature (154)..(154): n is a, c, t, g, unknown, or other
  misc_feature (159)..(159): n is a, c, t, g, unknown, or other
  misc_feature (168)..(168): n is a, c, t, g, unknown, or other
  misc_feature (172)..(172): n is a, c, t, g, unknown, or other
  misc_feature (175)..(175): n is a, c, t, g, unknown, or other
  misc_feature (679)..(679): n is a, c, t, g, unknown, or other
  misc_feature (680)..(680): n is a, c, t, g, unknown, or other
  misc_feature (686)..(686): n is a, c, t, g, unknown, or other
  misc_feature (724)..(724): n is a, c, t, g, unknown, or other
  misc_feature (737)..(737): n is a, c, t, g, unknown, or other
ttggaattaattctgcggccatggggctgcaggaattcgatggcccgatcggccacagttttcttttctcatcttacaacaagtttccaggaggatagagacataaacgaagctcnggattgtatcgttctttttnagcttttattcacatccngaaangtcctgtangttntangattctgttatcttgcggttttgagttaatcagaaacagagtaatcaatgtaatgttgcaggctagatctttcatctttggaaatttgtttttttctcatgcaatttctttagcttgaccatgagtgactaaaagatcaatcagtagcaatgatttgatttggctaagagacatttgtccacttggcatcttgatttggatggttacaacttgcaagacccaattggatacttgctatgacaactccaactcaagagtgtcgtgtaactaagaaccttgactaatttgtaatttcaatcccaagtcatgttactatatgtttttttgtttgtattattttctctcctacaattaagctctttgacgtacgtaatctccggaaccaactcctatatccaccatttactccacgttgtctccaattattggacgttgaaacttgacacaacgtaaacgtatctacgtggttgattgtatgtacatatgtacaaacgtacacctttnnctcctnctttcacttcatcacttggcttgtgaattcattaattncctgcgaaggccntgcagggccatcaccactgcagtggaacaatgaagactaatctttttctctttctcatcttttcacttctcctatcattatcctcggccgaattcagtaaaggagaagaacttttcactg

SEQ ID NO: 79 - DNA, 235 bp, Artificial sequence
  misc_feature: The sequence contains some vector sequence.
  misc_feature: The Glycine max sequence was truncated during cloning.
  misc_feature: Ceres CLONE ID no. 590462
  misc_feature: Ceres SEED LINE ME03169
  misc_feature: The sequence encodes the protein given in SEQ ID NO. 80
acagaaaatggactcgaacggctacttggtagttggagtggtagcttttgctctactttgctcattcagagtttctttgacagattcagttccattattttcgcctgttcatgacgctgcttctttgactcgcaactctttccctgctggcttcatctttggggctggatcctcagcctaccagttcgaaggagcagcaaaggaaggtggaagaggaccaagcatctggtattga

SEQ ID NO: 80 - protein, 75 aa, Artificial sequence
  misc_feature: Ceres CLONE ID no. 590462
  misc_feature: The sequence is encoded by SEQ ID NO. 79
  misc_feature: Ceres SEED LINE ME03169
MDSNGYLVVGVVAFALLCSFRVSLTDSVPLFSPVHDAASLTRNSFPAGFIFGAGSSAYQFEGAAKEGGRGPSIWY

SEQ ID NO: 81 - DNA, 1073 bp, Glycine max
  misc_feature: Ceres CLONE ID no. 625035
  misc_feature: Ceres SEED LINE ME03180
  misc_feature: The sequence encodes the protein given in SEQ ID NO. 82
tccaatattcaattcaacaccttccctcattctcttcaaatgtacggacaaagttgctacgagtccgatttggcccttttggactccattcgccgccacttactcggcgactccgaggaacacagattcggagccccgaatgttaattcgggtagcactccattgtactctcggagctccagtttcggcaggttgtacccttgcctgagtaacgattggggcgaacttcctcttatggaagacgattcagaagacatgcttctttatggtgttcttcgcgacgccgtgaacgtaggctgggtcccatctctcgacgcttcctcaccggagagtttctcgtcggctttcatgccgccggtgaccgtgaaatccgaaacggatctatttccggcaccggaaccgatttgtaaccctccggtggttcagggcccggcgccggcggtagttccggcgaaagggaagcactaccggggcgtgcggcagcgaccgtggggaaaattcgcagcggagatccgcgacccggctaaaaatggggctcgggtttggcttgggacttttgagacggctgaggacgccgcgctggcttacgatcgagccgcgtatcgaatgcgcggctcgcgggctttgttgaattttccgctccggattaattcgggcgagcccgaaccggttcgagttacggcgaagcgggcttcagcagaaccgtgttcttcgtcggagagtggatcttgggtgaagaagcggaagaaggtggtgggttgagaacggggcacgtcgagagcagttgttggtgaagtaatttgtgatgctaaaaaggggtggaataaatgggttggcatgctcactcattgctcaagtgggactgtgggactgatcaaatctaaagctaaaaaagaaaacaaaccacatttggaaaaactgattagggtcgaggttctgtttggctttgtgaatacagttacaagatttcttattttttggttcaattctataataatatctgtaacatagttgggtagggcacccacccttgtgctaaactaagtgatttcaataaaatatattttgccttt

SEQ ID NO: 82 - protein, 240 aa, Glycine max
  misc_feature: Ceres CLONE ID no. 625035
  misc_feature: Ceres SEED LINE ME03180
  misc_feature (141)..(205): Pfam Name. AP2 Pfam Description. AP2 domain
MYGQSCYESDLALLDSIRRHLLGDSEEHRFGAPNVNSGSTPLYSRSSSFGRLYPCLSNDWGELPLMEDDSEDMLLYGVLRDAVNVGWVPSLDASSPESFSSAFMPPVTVKSETDLFPAPEPICNPPVVQGPAPAVVPAKGKHYRGVRQRPWGKFAAEIRDPAKNGARVWLGTFETAEDAALAYDRAAYRMRGSRALLNFPLRINSGEPEPVRVTAKRASAEPCSSSESGSWVKKRKKVVG

SEQ ID NO: 83 - protein, 282 aa, Mesembryanthemum crystallinum
  misc_feature: Public GI no. 32401273
  misc_feature (136)..(200): Pfam Name. AP2 Pfam Description. AP2 domain
  misc_feature: The sequence is a funtional homolog of Ceres CLONE ID no. 625035 at SEQ ID NO. 82 with e-value of 1.10E-53 and BLAST sequence identity of 69.6
MSLIANFESDFAVLESIRRHLLEDWDPRAGAPAITTGSGPVYHRNSSFSSLYPCLTDNWGELPLKEDDSEDMVLFGVLRDAVHTGWSPQSGSESGSGSPAPVTVKPEPVDSPVSSPAPVRVAGGEAPVAAAPARGKHYRGVRRRPWGKFAAEIRDPAKNGARVWLGTFETAEDAALAYDRAAFRMRGSKALLNFPLRVNSGEPDPVRITSKRSSPERSVSSSSSESASPKRRKKEEVVVGPVAGQARPGLQQVGNVVEGMQVGVGCQVGVGTMPLGDQLLVT

SEQ ID NO: 84 - protein, 303 aa, Oryza sativa
  misc_feature: Public GI no. 14140141
  misc_feature (147)..(211): Pfam Name. AP2 Pfam Description. AP2 domain
  misc_feature: The sequence is a funtional homolog of Ceres CLONE ID no. 625035 at SEQ ID NO. 82 with e-value of 2.60E-36 and BLAST sequence identity of 55.0
MLLNPASREVAALDSIRHHLLEEEEETPATAPAPTRRPVYCRSSSFGSLVADQWSESLPFRPNDAEDMVVYGALRDAFSSGWLPDGSFAAVKPESQDSYDGSSIGSFLASSSSEAGTPGEVTSTEATVTPGIREGEGEAVAVASRGKHYRGVRQRPWGKFAAEIRDPAKNGARVWLGTFDSAEEAAVAYDRAAYRMRGSRALLNFPLRIGSEIAAAAAAAAAGNKRPYPDPASSGSSSPSSSSSSSSSSSSGSPKRRKRGEAAPASMAMALVPPPPPPAQAPVQLALPAQPWFAAGPIQQLVS

SEQ ID NO: 85 - protein, 303 aa, Oryza sativa subsp. japonica
  misc_feature: Public GI no. 50911399
  misc_feature (147)..(211): Pfam Name. AP2 Pfam Description. AP2 domain
  misc_feature: The sequence is a funtional homolog of Ceres CLONE ID no. 625035 at SEQ ID NO. 82 with e-value of 2.60E-36 and BLAST sequence identity of 55.0
MLLNPASREVAALDSIRHHLLEEEEETPATAPAPTRRPVYCRSSSFGSLVADQWSESLPFRPNDAEDMVVYGALRDAFSSGWLPDGSFAAVKPESQDSYDGSSIGSFLASSSSEAGTPGEVTSTEATVTPGIREGEGEAVAVASRGKHYRGVRQRPWGKFAAEIRDPAKNGARVWLGTFDSAEEAAVAYDRAAYRMRGSRALLNFPLRIGSEIAAAAAAAAAGNKRPYPDPASSGSSSPSSSSSSSSSSSSGSPKRRKRGEAAAASMAMALVPPPPPPAQAPVQLALPAQPWFAAGPIQQLVS

SEQ ID NO: 86 - DNA, 1132 bp, Arabidopsis thaliana
  misc_feature: Ceres CLONE ID no. 5344
  misc_feature: Ceres SEED LINE ME05421
  misc_feature: The sequence encodes the protein given in SEQ ID NO. 87
catcaaaattcaaaaccaacaccatggataagacagcgacattactttccactctcttgttcttgttcacattcctcacgacctgtttgtctaaagatctctgtaaccaaaatgacaaaaacaccctcctcaagatcaagaaatctctaaacaacccttatcacctcgcttcatgggaccctcaaaccgactgttgctcctggtactgccttgagtgcggcgacgccaccgttaaccaccgtgttaccgccttaaccatattctccggccagatctccggtcagatcccggctgaagtcggtgacttgccgtatcttgagacccttgtcttccgcaaactctctaacctcaccggtacaatccaacccaccatcgccaaactcaagaacctccgaatgctcaggctcagctggacgaatctgacaggtccaattcctgactttataagtcagctcaagaatctcgagttcttagaactttccttcaatgatctctctggttccattccaagttctctctctacgttacctaaaatcttggctcttgaacttagcaggaacaaacttacaggttccataccagagtcatttgggtcgtttccaggaacagtccctgaccttcgcctatcacataaccagctctccggtccaatacccaaatcattaggcaacatcgactttaaccggatcgatttatcccgcaacaagctccaaggtgatgcttcgatgttgtttggttccaacaaaacaacctggtctattgacttatcaagaaacatgttccagttcgatatctcaaaggttgatatccctaaaacacttggtatcttggacttgaaccacaatgggatcactgggaatattccggtgcagtggactgaagctcctcttcagttcttcaatgttagctacaacaaactgtgtggacacatcccaactggagggaaacttcagacatttgattcttattcctattttcacaacaagtgtttgtgtggtgctcctcttgaaatttgcaagtaaaccaagcttatctctaggattacgaaaaaatatatttgagtcaataatatagacaaatatgtaatgttattcggattgattaataaaacatgaaccaaacctctcattcg

SEQ ID NO: 87 - protein, 332 aa, Arabidopsis thaliana
  misc_feature: Ceres CLONE ID no. 5344
  misc_feature: Ceres SEED LINE ME05421
  misc_feature (146)..(169): Pfam Name. LRR_1 Pfam Description. Leucine Rich Repeat
MDKTATLLSTLLFLFTFLTTCLSKDLCNQNDKNTLLKIKKSLNNPYHLASWDPQTDCCSWYCLECGDATVNHRVTALTIFSGQISGQIPAEVGDLPYLETLVFRKLSNLTGTIQPTIAKLKNLRMLRLSWTNLTGPIPDFISQLKNLEFLELSFNDLSGSIPSSLSTLPKILALELSRNKLTGSIPESFGSFPGTVPDLRLSHNQLSGPIPKSLGNIDFNRIDLSRNKLQGDASMLFGSNKTTWSIDLSRNMFQFDISKVDIPKTLGILDLNHNGITGNIPVQWTEAPLQFFNVSYNKLCGHIPTGGKLQTFDSYSYFHNKCLCGAPLEICK

SEQ ID NO: 88 - protein, 331 aa, Brassica napus
  misc_feature: Public GI no. 26094811
  misc_feature (169)..(192): Pfam Name. LRR_1 Pfam Description. Leucine Rich Repeat
  misc_feature: The sequence is a funtional homolog of Ceres CLONE ID no. 5344 at SEQ ID NO. 87 with e-value of 2.29E-149 and BLAST sequence identity of 82.7
MDKTTTLLLFFFLFTFLTTSFSKNLCNQDDKTTLLKIKKALNNPYHLASWDPRTDCCSWYCLECGDATVNHRVTALTIFSGQISGQIPPEVGDLSYLQTLVFRKLTNLTGQIPRTIAKLKYLRSLRLSWTNLTGPVPGFLSELKNLQWVDLSFNDLSGSIPSSLSLLPNLVSLDLSRNKLTGSIPESFGSFPAKVPDLYLSHNQLSGYIPKTLGNLDFSKIDFSRNKLGGDASMLFRANKTTWYIDLSRNMLQFDLSRVVIPKTLGILDLNHNGITGNIPVQWTEAPLQFFNVSYNRLCGHIPTGGTLQEFDTYSYFHNKCLCGAPLDSCK

SEQ ID NO: 89 - protein, 331 aa, Brassica napus; identical to SEQ ID NO: 88
  misc_feature: Ceres CLONE ID no. 1301219
  misc_feature (169)..(192): Pfam Name. LRR_1 Pfam Description. Leucine Rich Repeat
  misc_feature: The sequence is a funtional homolog of Ceres CLONE ID no. 5344 at SEQ ID NO. 87 with e-value of 2.29E-149 and BLAST sequence identity of 82.7

SEQ ID NO: 90 - protein, 336 aa, Zea mays
  misc_feature: Ceres CLONE ID no. 1411115
  misc_feature (149)..(172): Pfam Name. LRR_1 Pfam Description. Leucine Rich Repeat
  misc_feature: The sequence is a funtional homolog of Ceres CLONE ID no. 5344 at SEQ ID NO. 87 with e-value of 4E-136 and BLAST sequence identity of 76.5
MDHKTNTTLLFSLLFSITYLITIATSKDLCNQNDKNTLLKIKKSLNNPYHLASWHPETDCCSWYCLECGDATVNHRVISLTIFAGQISGQIPPEVGDLPYLQNLMFHRITNITGQIPSTITKLKYLRSLMLSWLNLTGPVPDFLSQLMNLEYLSLAFNQLSGSIPSSLALLPKLSYIDVSRNKLTGTIPESFGSFPAEVPHLIFSHNQLSGSIPKSLGNLDFNRIDFSRNKLTGDASMLFGANKTTFSIDLSRNMFQFDLSRVVLHESLGVLDLNHNGITGSIPVQWTEYSLQILNVSYNRLCGPIPTGGSLQRFDSYTYFHNKCLCGAPLDSSCK

SEQ ID NO: 91 - protein, 327 aa, Citrus iyo
  misc_feature: Public GI no. 3337095
  misc_feature (142)..(165): Pfam Name. LRR_1 Pfam Description. Leucine Rich Repeat
  misc_feature: The sequence is a funtional homolog of Ceres CLONE ID no. 5344 at SEQ ID NO. 87 with e-value of 3.29E-116 and BLAST sequence identity of 69.5
MSNTSLLSLFFFLSLCISPSLSDLCNPNDKKVLLKFKKSLNNPYVLASWNPKTDCCDWYCVTCDLTTNRINSLTIFAGDLPGQIPPEVGDLPYLETLMFHKLPSLTGPIQPAIAKLKNLKTLRISWTNISGPVPDFISQLTNLTFLELSFNNLSGAIPGSLSKLQKLGALHLDRNKLTGSIPESFGTFTGSIPDLYLSHNQLSGKIPASLGSMDFNTIDLSRNKLEGDASFLFGLNKTTQRIDVSRNLLEFNLSKVEFPESLTNLDLNHNKIFGSIPAQITSLENLGFLNVSYNRLCGPIPVGGKLQSFGYTEYFHNRCLCGAPLER

SEQ ID NO: 92 - protein, 327 aa, Citrus unshiu
  misc_feature: Public GI no. 3337091
  misc_feature (142)..(165): Pfam Name. LRR_1 Pfam Description. Leucine Rich Repeat
  misc_feature: The sequence is a funtional homolog of Ceres CLONE ID no. 5344 at SEQ ID NO. 87 with e-value of 5.40E-116 and BLAST sequence identity of 69.5
MSNTSLLSLFFFLCLCISPSLSDLCNPNDKKVLLKFKKSLNNPYVLASWNPKTDCCDWYCVTCDLTTNRINSLTIFAGDLPGQIPPEVGDLPYLETLMFHKLPSLTGPIQPAIAKLKNLKTLRISWTNISGPVPDFISQLTNLTFLELSFNNLSGTIPGSLSKLQKLGALHLDRNKLTGSIPESFGTFTGSIPDLYLSHNQLSGKIPASLGSMDFNTIDLSRNKLEGDASFLFGLNKTTQRIDVSRNLLEFNLSKVEFPQSLTNLDLNHNKIFGSIPAQITSLENLGFLNVSYNRLCGPIPVGGKLQSFGYTEYFHNRCLCGAPLER

SEQ ID NO: 93 - protein, 329 aa, Citrus sp. cv. sannumphung
  misc_feature: Public GI no. 18148925
  misc_feature (142)..(165): Pfam Name. LRR_1 Pfam Description. Leucine Rich Repeat
  misc_feature: The sequence is a funtional homolog of Ceres CLONE ID no. 5344 at SEQ ID NO. 87 with e-value of 2.89E-117 and BLAST sequence identity of 69.5
MSNTSLLSLFFFLCLCISPSLSDLCNPNDKKVLLKFKKSLNNPYVLASWNPKTDCCDWYCVTCDLTTNRINSLTIFAGDLPGQIPPEVGDLPYLETLMFHKLPSLTGPIQPAIAKLKNLKTLRISWTNISGPVPDFISQLTNLTFLELSFNNLSGTIPGSLSKLQKLGALHLDRNKLTGSIPESFGTFTGSIPDLYLSHNQLSGKIPASLGSMDFNTIDLSRNKLEGDASFLFGLNKTTQRIDVSRNLLEFNLSKVEFPQSLTNLDLNHNEIFGSIPAQITSLENLGFLNVSYNRLCGPIPVGGKLQSFGYTEYFHNRCLCGAPLESCK

SEQ ID NO: 94 - protein, 327 aa, Citrus sp. cv. sannumphung
  misc_feature: Public GI no. 3242641
  misc_feature (142)..(165): Pfam Name. LRR_1 Pfam Description. Leucine Rich Repeat
  misc_feature: The sequence is a funtional homolog of Ceres CLONE ID no. 5344 at SEQ ID NO. 87 with e-value of 1.40E-115 and BLAST sequence identity of 69.2
MSNTSLLSLFFFLCLCISPSLSDLCNPNDKKVLLKFKKSLNNPYVLTSWNPKTDCCDWYCVTCDLTTNRINSLTIFAGDLPGQIPPEVGDLPYLETLMFHKLPSLTGPIQPAIAKLKNLKTLRISWTNISGPVPDFISQLTNLTFLELSFNNLSGTIPGSLSKLQKLGALHLDRNKLTGSIPESFGTFTGSIPDLYLSHNQLSGKIPASLGSMDFNTIDLSRNKLEGDASFLFGLNKTTQRIDVSRNLLEFNLSKVEFPQSLTNLDLNHNKIFGSIPAQITSLENLGFLNVSYNRLCGPIPVGGKLQSFGYTEYFHNRCLCGAPLER

SEQ ID NO: 95 - protein, 327 aa, Citrus sinensis
  misc_feature: Public GI no. 1617034
  misc_feature (142)..(165): Pfam Name. LRR_1 Pfam Description. Leucine Rich Repeat
  misc_feature: The sequence is a funtional homolog of Ceres CLONE ID no. 5344 at SEQ ID NO. 87 with e-value of 1.80E-115 and BLAST sequence identity of 69.2
MSNTSLLSLFFFLCLCISPSLSDLCNPNDKKVLLKFKKSLNNPYVLASWNPKTDCCDWYCVTCDLTTNRINSLTIFAGDLPGQIPPEVGDLPYLETLMFHKLPSLTGPIQPAIAKLKNLKTLRISWTNISGPVPDFIRQLTNLTFLELSFNNLSGTIPGSLSKLQKLGALHLDRNKLTGSIPESFGTFTGSIPDLYLSHNQLSGKIPASLGSMDFNTIDLSRNKLEGDASFLFGLNKTTQRIDVSRNLLEFNLSKVEFPQSLTNLDLNHNKIFGSIPAQITSLENLGFLNVSYNRLCGPIPVGGKLQSFGYTEYFHNRCLCGAPLER

SEQ ID NO: 96 - protein, 327 aa, Citrus jambhiri
  misc_feature: Public GI no. 3205177
  misc_feature (261)..(284): Pfam Name. LRR_1 Pfam Description. Leucine Rich Repeat
  misc_feature: The sequence is a funtional homolog of Ceres CLONE ID no. 5344 at SEQ ID NO. 87 with e-value of 3.00E-115 and BLAST sequence identity of 69.2
MSNTSLLSLFFFLCLCISPSLSDLCNPNDKKVLLKFKKSLNNPYVLASWNPKTDCCDWYCVTCDLTTNRINSLTIFAGDLPGQIPPEVGDLPYLETLMFHKLPSLTGPIQPAIAKLKNLKTLRISWTNISGPVPDFISQLTNLTFLEPSFNNLSGTIPGSLSKLQKLGALHLDRNKLTGSIPESFGTFTGSIPDLYLSHNQLSGKIPASLGSMDFNTIDLSRNKLEGDASFLFGLNKTTQRIDVSRNLLEFNLSKVEFPQSLTNLDLNHNKIFGSIPAQITSLENLGFLNVSYNRLCGPIPVGGKLQSFGYTEYFHNRCLCGAPLER

SEQ ID NO: 97 - protein, 329 aa, Citrus sp. cv. sannumphung
  misc_feature: Public GI no. 18148376
  misc_feature (142)..(165): Pfam Name. LRR_1 Pfam Description. Leucine Rich Repeat
  misc_feature: The sequence is a funtional homolog of Ceres CLONE ID no. 5344 at SEQ ID NO. 87 with e-value of 3.70E-117 and BLAST sequence identity of 69.2
MSNTSLLSLFFFLCLCISPSLSDLCNPNDKKVLLKFKKSLNNPYVLASWNPKTDCCDWYCVTCDLTTNRINSLTIFAGDLPGQIPPEVGDLPYLETLMFHKLPSLTGPVQPAIAKLKNLKTLRISWTNISGPVPDFISQLTNLTFLELSFNNLSGTIPGSLSKLQKLGALHLDRNKLTGSIPESFGTFTGSIPDLYLSHNQLSGKIPASLGSMDFNTIDLSRNKLEGDASFLFGLNKTTQRIDVSRNLLEFNLSKVEFPQSLTNLDLNHNKIFGSIPAQITSLENLGFLNVSYNRLCGPIPVGGKLQSFGYTEYFHNRCLCGAPLESCK

SEQ ID NO: 98 - protein, 330 aa, Gossypium barbadense
  misc_feature: Public GI no. 33469566
  misc_feature (143)..(166): Pfam Name. LRR_1 Pfam Description. Leucine Rich Repeat
  misc_feature: The sequence is a funtional homolog of Ceres CLONE ID no. 5344 at SEQ ID NO. 87 with e-value of 6.20E-115 and BLAST sequence identity of 69.0
MKIYPAFLSFLFITIFISPSVSDHCNAQDKKVLLKIKKALGNPYLLASWDPKTDCCDWYCLECHPNTHRVVSLTLFSDDRLTGQIPPEVGDLPYLETLLFRHLPNLNGTIQPAIAKLKNLKMLRLSWTNLSGPVPNFLSQLKNLTYLDLSFNNLSGSIPSSLSTLPNLEDLHLDRNKLTGTIPESFGMFPRKNLYLFILSHNKLSGTIPASLANMDFNTIDLSRNLLEGDPSVLFGPNKTTFEIDLSRNMFQFGLSKVQFPKSLARLDLNHNKITGSIPAGLTDLELQFMNVSYNRLCGQIPVGGRLQSFDYSTYFHNRCLCGAPLDTCK

SEQ ID NO: 99 - protein, 327 aa, Citrus iyo
  misc_feature: Public GI no. 3337093
  misc_feature (142)..(165): Pfam Name. LRR_1 Pfam Description. Leucine Rich Repeat
  misc_feature: The sequence is a funtional homolog of Ceres CLONE ID no. 5344 at SEQ ID NO. 87 with e-value of 3.79E-115 and BLAST sequence identity of 68.9
MSNTSLLSLFFFLSLCISPSLSDLCNPNDKKVLLKFKKSLNNPYVLASWNPKTDCCDWYCATCDLTTNRINSLTIFAGDLPGQIPPEIGDLPYLETLMFHKLPSLTGPIQPAIAKPKNLKTLRISWTNISGPVPDFISQLTNLTFLELSFNNLSGTIPGSLSKLQKLGALHLDRNKLTGSIPESFGTFTGSIPDLYLSHNQLSGKIPASLGSMDFNTIDLSRNKLEGDASFLFGLNKTTQRIDVSRNLLEFNLSKVEFPQSLTNLDLNHNKIFGSIPAQITSLENLGFLNVSYNRLCGPIPVGGKLQSFGYTEYFHNRCLCGAPLER

SEQ ID NO: 100 - protein, 329 aa, Citrus sp. cv. sannumphung
  misc_feature: Public GI no. 18148923
  misc_feature (142)..(165): Pfam Name. LRR_1 Pfam Description. Leucine Rich Repeat
  misc_feature: The sequence is a funtional homolog of Ceres CLONE ID no. 5344 at SEQ ID NO. 87 with e-value of 2.00E-116 and BLAST sequence identity of 68.9
MSNTSLLSLFFFLCLCISPSLSDLCNPNDKKVLLKFKKSLNNPYVLASWNPKTGCCDWYCVTCDLTTNRINSLTVFAGDLPGQIPPEVGDLPYLETLMFHKLPSLTGPIQPAIAKLKNLKTLRISWTNISGPVPDFISQLTNLTFLELSFNNLSGTIPGSLSKLQKLGALHLDRNKLTGSIPESFGTFTGSIPDLYLSHNQLSGKIPASLGSMDFNTIDLSRNKLEGDASFLFGLNKTTQRIDVSRNLLEFNLSKVEFPQSLTNLDLNHNKIFGSIPAQITSLENLGFLNVSYNRLCGPIPVGGKLQSFGYTEYFHNRCLCGAPLESCK

SEQ ID NO: 101 - protein, 327 aa, Fortunella margarita
  misc_feature: Public GI no. 3978580
  misc_feature (142)..(165): Pfam Name. LRR_1 Pfam Description. Leucine Rich Repeat
  misc_feature: The sequence is a funtional homolog of Ceres CLONE ID no. 5344 at SEQ ID NO. 87 with e-value of 9.10E-114 and BLAST sequence identity of 68.3
MSNTSLLSLFFFLCLCISPSLSDLCNPNDKKVLLKFKKALNNPYVLASWNPKTDCCDWYCVTCDLTTNRINSLTIFAGDLPGQIPPEVGDLPYLDTLMFHKLPSLTGPIQPAIAKLKNLKTLRISWTNISGPVPDFISQLTNLTFLELSFNNLSGTIPGSLSKLQKLGALHLDRNKLTGSIPESSGTFTGSIPDPYLSHNQLSGKIPASLGSMDFNTIDLSRNKLEGDASFLFGLNKTTQRIDVSRNLLEFNLSKVEFPESLTNLDLNHNKIFGSIPAQITSLENLGFLNVSYNRLCGPIPVGGKLQSFGYTEYFHNRCLCGAPLER

SEQ ID NO: 102 - protein, 327 aa, Poncirus trifoliata
  misc_feature: Public GI no. 3978578
  misc_feature (142)..(165): Pfam Name. LRR_1 Pfam Description. Leucine Rich Repeat
  misc_feature: The sequence is a funtional homolog of Ceres CLONE ID no. 5344 at SEQ ID NO. 87 with e-value of 6.20E-115 and BLAST sequence identity of 68.3
MSNTSLLSLFFFLSLFTSLSLSDLCNPNDKRVLLNFKKALNNPYVLASWNPKTDCCDWYCVTCDLTTNRINSLTIFAGDLPGQIPPEVGDLPYLETLMFHKLPSLTGPIQPAIAKLKNLKMLRISWTNISGPVPDFISQLTNLTFLELSFNNLSGTIPSSLSKLRKLGALHLDRNKLTGSIPDSFGTFTGSIPDLYLSHNQLSGKIPASLGSMDFNTIDLSRSKLEGDASFLFGLNKTTQRIDVSRNLLEFNLSKVEFPESLTNLDLNHNKIFGSIPAQITSLENLGFLNVSYNRLCGPIPVGGKLQSFGYKEYFHNRCLCGAPLER

SEQ ID NO: 103 - protein, 327 aa, Citrus latipes
  misc_feature: Public GI no. 19110472
  misc_feature (142)..(165): Pfam Name. LRR_1 Pfam Description. Leucine Rich Repeat
  misc_feature: The sequence is a funtional homolog of Ceres CLONE ID no. 5344 at SEQ ID NO. 87 with e-value of 3.79E-115 and BLAST sequence identity of 68.0
MSNTSLLSLIFILSLFISPSLSDLCNPNDKKVLLKFKKALNNPYVLASWNPKTDCCDWYCVTCDLSTNRINSLTIFAGDLPGQIPSEVGDLPYLETLMFHKLPSLTGPIQPAIAKLKNLKTLRISWTNISGPVPDFISQLTNLTFLELSFNNLSGTIPSSLSKLQKLGALHLDRNKLTGSIPESFGTFTGSIPDLYLSHNQLSGKIPASLGSMDFNTIDLSRNKLEGGASFLFGLNKTTQRIDVSRNLLEFNLSKVEFPQSLTNLDLNHNKIFGSIPAQITSLENLGFLNVSYNRLCGPIPVGGKLQSFGYTEYFHNRCLCGAPLEI

SEQ ID NO: 104 - protein, 327 aa, Citrus hystrix
  misc_feature: Public GI no. 19110474
  misc_feature (142)..(165): Pfam Name. LRR_1 Pfam Description. Leucine Rich Repeat
  misc_feature: The sequence is a funtional homolog of Ceres CLONE ID no. 5344 at SEQ ID NO. 87 with e-value of 2.69E-114 and BLAST sequence identity of 68.0
MSNTSLLSLIFILSLFIPPSLSDLCNPNDKKVLLKFKKALNNPYVLASWNPKTDCCDWYCVTCDLSTNRINSLTIFAGDLPGQIPSEVGDLPYLETLMFHKLPSLTGPIQPAIAKLKNLKTLRISWTNISGPVPDFISQLTNLTFLELSFNNLSGTIPSSLSKLQKLGALHLDRNKLTGSIPESFGTFTGSTPDLYLSHNQLSGKIPASLGSMDFNTIDLSRNKLEGDASFLIGLNKTTQRIDVSRNLLEFNLSKVEFPESLTNLDLNHNKIFGSIPAQITSLENLGFLNVSYNRLCGPIPVGGKLQSFGYTEYFHNRCLCGAPLER

SEQ ID NO: 105 - protein, 327 aa, Citrus aurantiifolia
  misc_feature: Public GI no. 19110478
  misc_feature (142)..(165): Pfam Name. LRR_1 Pfam Description. Leucine Rich Repeat
  misc_feature: The sequence is a funtional homolog of Ceres CLONE ID no. 5344 at SEQ ID NO. 87 with e-value of 1.89E-113 and BLAST sequence identity of 68.0
MSNTSLLSLFFFLSLFISPSLSDLCNPNDKKVLLKFKKALNNPYVLASWNPKTDCCDWYCVTCDLTTNRINSLTIFAGDLPGQIPPEVGDPPYLETLMFHKLPSLTGPIQPAIAKLKNLKTLRISWTNISGLVPDFISQLTNLTFLELSFNNLSGTIPSSLSKLQKLGALHLDRNKLTGSIPESFGTFTGSIPDLYLSHNQLSGKIPASLGSMDFNTIDLSRNKLEGDASFLFGLNKTTQRIDVSRNLLESNLSKVEFPESLTNLDLNHNKIFGSIPAQITSLENLGFLNVSYNRLCGPIPVGGKLQSFGYTEYFHNRCLCGAPLER

SEQ ID NO: 106 - protein, 329 aa, Citrus jambhiri
  misc_feature: Public GI no. 17221624
  misc_feature (142)..(165): Pfam Name. LRR_1 Pfam Description. Leucine Rich Repeat
  misc_feature: The sequence is a funtional homolog of Ceres CLONE ID no. 5344 at SEQ ID NO. 87 with e-value of 6.20E-115 and BLAST sequence identity of 67.9
MSNTSLLSLFFFLSLFISPSLSDLCNPNDKKVLLKFKKALNNPYVLASWNPKTDCCDWYCVTCDLTTNRINSLTIFAGDLPGQIPPEVGDLPYLETLMFHKLPSLTGPIQPAIAKLKNLKTLRISWTNISGLVPDFISQLTNLTFLELSFNNLSGTIPSSLSKLQKLGALHLDRNKLTGSIPESFGTFTGSIPDLYLSHNQLSGKIPASLGSMDFNTIDLSRNKLEEDASFLFGLNKTTQRIDVSRNLLEFNLSKVEFPESLTNLDLNHNKIFGSIPAQITSLENLGFLNVSYNRLCGPIPVGGKLQSFGYTEYFHNRCLCGPPLESCK

SEQ ID NO: 107 - protein, 327 aa, Citrus jambhiri
  misc_feature: Public GI no. 3192102
  misc_feature (142)..(165): Pfam Name. LRR_1 Pfam Description. Leucine Rich Repeat
  misc_feature: The sequence is a funtional homolog of Ceres CLONE ID no. 5344 at SEQ ID NO. 87 with e-value of 8.19E-113 and BLAST sequence identity of 67.6
MSNTSLLSLFFFLSLFISPSLSDLCNPNDKKVLLKFKKALNNPYVLASWNPKTDCCDWYCVTCDLTTNRINSLTIFAGDLPGQIPPEVGDLPYLETLMFHKLPSLTGPIQPAIAKLKNLKTLRISWTNISGLVPDFISQLTNLTFLELSFNNLSGTIPGSLSKLQKLGALHLDRNKLTGSIPESFGTFTGSIPDLYLSHNQLSGKIPASLGSMDFNTIDLSRNKLGEDASFLFGLNKTTQRIDVSRNLLEFNLSKVEFPQSLTNLDLNHNKIFGSIPAQITSLENLGFLNVSYNRLCGPIPVGGKLQSFGYTEYFHNRCLCGPPLER

SEQ ID NO: 108 - protein, 329 aa, Citrus jambhiri
  misc_feature: Public GI no. 17221626
  misc_feature (142)..(165): Pfam Name. LRR_1 Pfam Description. Leucine Rich Repeat
  misc_feature: The sequence is a funtional homolog of Ceres CLONE ID no. 5344 at SEQ ID NO. 87 with e-value of 2.09E-114 and BLAST sequence identity of 67.6
MSNTSLLSLFFFLSLFISPSLSDLCNPNDKKVLLKFKKALNNPYVLACWNPKTDCCDWYCVTCDLTTNRINSLTIFAGDLPGQIPPEVGDLPYLETLMFHKLPSLTGPIQPAIAKLKNLKTLRISWTNISGLVPDFISQLTNLTFLELSFNNLSGTIPSSLSKLQKLGALHLDRNKLTGSIPESFGTFTGSIPDLYLSHNQLSGKIPASLGSMDFNTIDLSRNKLEEDASFLFGLNKTTQRIDVSRNLLEFNLSKVEFPESLTNLDLNHNKIFGSIPAQITSLENLGFLNVSYNRLCGPIPVGGKLQSFGYTEYFHNRCLCGPPLESCK

SEQ ID NO: 109 - protein, 330 aa, Prunus persica
  misc_feature: Public GI no. 58379364
  misc_feature (144)..(167): Pfam Name. LRR_1 Pfam Description. Leucine Rich Repeat
  misc_feature: The sequence is a funtional homolog of Ceres CLONE ID no. 5344 at SEQ ID NO. 87 with e-value of 6.90E-116 and BLAST sequence identity of 67.4
MDVKFPTLLCLTLLFSSILNQALSELCNPEDKKVLLQIKKAFNDPYVLASWKPETDCCDWYCVTCDSTTNRINSLTIFSGQVSGQIPTQVGDLPYLETLEFHKQPNLTGPIQPSIAKLKRLKELRLSWTNISGSVPDFLSQLKNLTFLELSFSNLTGSIPSSLSQLPNLNALHLDRNKLTGHIPKSFGEFHGSVPELYLSHNQLSGNIPTSLAKLDFNRIDFSRNKLEGDASMIFGLNKTTQIVDLSRNLLEFNLSKVEFSKSLISLDLNHNKITGGIPVGLTQLDLQFLNVSYNRLCGQIPVGGKLQSFDSSTYFHNRCLCGAPLPSCK

SEQ ID NO: 110 - protein, 327 aa, Microcitrus sp. citruspark01
  misc_feature: Public GI no. 19110476
  misc_feature (142)..(165): Pfam Name. LRR_1 Pfam Description. Leucine Rich Repeat
  misc_feature: The sequence is a funtional homolog of Ceres CLONE ID no. 5344 at SEQ ID NO. 87 with e-value of 7.29E-112 and BLAST sequence identity of 67.3
MSNTSLLSLFFFLSLFISPSLSDLCNPNDKKVLLKFKKALNNPYVLASWNPKTDCCDWYCVTCDLTTNRINSLTIFAGDLPGQIPPEVGYLPSLETLMFHKLPSLTGPIQPAIAKLKNPKTLRISWTNISGPVPYFISQLTNLTFLELSFNNLSGTIPSSLSKLQRLGALHLDRNKLTGSIPESFGTFTGSIPDLYLSHNQLSGKIPASLGSMDFNTIDLSRNKLEGDASFLFGLNKTTQRIDVSRNLLEFNLSKVEFPQSLTNLDLNHNKIFGSIPGQITSLENLGFLNVSYNRLCGPIPVGGKLQSFGYTEYFHNRCLCGAPLER

SEQ ID NO: 111 - protein, 327 aa, Actinidia deliciosa
  misc_feature: Public GI no. 1143381
  misc_feature (141)..(164): Pfam Name. LRR_1 Pfam Description. Leucine Rich Repeat
  misc_feature: The sequence is a funtional homolog of Ceres CLONE ID no. 5344 at SEQ ID NO. 87 with e-value of 5.60E-114 and BLAST sequence identity of 67.1
MKSTTAISLLLFLSLLSPSLSDRCNPNDKKVLLRIKQALNNPYLLASWNPDNDCCDWYNVDCDLTTNRIIALTIFSGNISGQIPAAVGDLPYLQTLIFRKLSNLTGQIPSAISKLSNLKMVRLSWTNLSGPVPSFFSQLKNLTFLDLSFNDLTGSIPSSLSKLTNLDAIHLDRNKLTGPIPNSFGEFTGQVPDLYLSHNQLTGSIPKTLGDLNFTVIDVSRNMLSGDISFMFGSNKTIQIVDFSRNKFQFDLSKVVFPQSLTSLDLNHNKIYGSLPVGLTKLDLQYLNVSYNRLCGHIPTGGKLQGFDQTSYFHNRCLCGAPLPDCK

SEQ ID NO: 112 - protein, 330 aa, Prunus persica
  misc_feature: Public GI no. 34068091
  misc_feature (144)..(167): Pfam Name. LRR_1 Pfam Description. Leucine Rich Repeat
  misc_feature: The sequence is a funtional homolog of Ceres CLONE ID no. 5344 at SEQ ID NO. 87 with e-value of 1.09E-115 and BLAST sequence identity of 67.1
MDVKFPTLLCLTLLFSTILNQALSELCNPEDKKVLLQIKKAFNDPYVLTSWKPETDCCDWYCVTCDSTTNRINSLTIFSGQVSGQIPTQVGDLPYLETLEFHKQPNLTGPIQPSIAKLKRLKELRLSWTNISGSVPDFLSQLKNLTFLDLSFSNLTGSIPSSLSQLPNLNALHLDRNKLTGHIPKSFGEFHGSVPELYLSHNQLSGNIPTSLAKLDFNRIDFSRNKLEGDASMIFGLNKTTQIVDLSRNLLEFNLSKVEFSKSLISLDLNHNKITGGIPVGLTQVDLQFLNVSYNRLCGQIPVGGKLQSFDSSTYFHNRCLCGAPLPSCK

SEQ ID NO: 113 - protein, 330 aa, Prunus persica
  misc_feature: Public GI no. 58379362
  misc_feature (144)..(167): Pfam Name. LRR_1 Pfam Description. Leucine Rich Repeat
  misc_feature: The sequence is a funtional homolog of Ceres CLONE ID no. 5344 at SEQ ID NO. 87 with e-value of 3.79E-115 and BLAST sequence identity of 67.1
MDVKFPTLLCLTLLFSSILNQALSELCNPEDKKVLLQIKKAFNDPYVLASWKPETDCCDWYCVTCDSTTNRINSLTIFSGQVSGQIPTQVGDLPYLETLEFHKQPNLTGPIQPSIAKLKRLKELRLSWTNISGSVPDFLSQLKNLTFLELSFSNLTGSIPSSLSQLPNLNALHLDRNKLTVNIPKSFGEFHGSVPELYLSHNQLSGNIPTSLAKLDFNRIDFSRNKLEGDASMIFGLNKTTQIVDLSRNLLEFNLSKVEFSKSLISLDLNHNKITGGIPVGLTQLDLQFLNVSYNRLCGQIPVGGKLQSFDSSTYFHNRCLCGAPLPSCK

SEQ ID NO: 114 - protein, 330 aa, Prunus mume
  misc_feature: Public GI no. 54306529
  misc_feature (144)..(167): Pfam Name. LRR_1 Pfam Description. Leucine Rich Repeat
  misc_feature: The sequence is a funtional homolog of Ceres CLONE ID no. 5344 at SEQ ID NO. 87 with e-value of 8.80E-116 and BLAST sequence identity of 66.8
MDVKFPTLLCLTLLFSAILNPALSELCNQEDKKVLLQIKKAFNDPYVLTSWKPETDCCDWYCVTCDSTTNRINSLTIFAGQVSGQIPAQVGDLPYLETLEFHKQPNLTGPIQPSIVKLKSLKFLRLSWTNISGSVPDFLSQLKNLTFLDLSFSNLTGSIPSSLSQLPNLNALHLDRNKLTGHIPKSFGEFHGSVPELYLSHNQLSGNIPTSLAKLDFNRIDFSRNKLEGDASMIFGLNKTTQIVDLSRNLLEFNLSKVEFSKSLISLDLNHNKITGGIPVGLTQVDLQFLNVSYNRLCGQIPVGGKLQSFDSSTYFHNRCLCGAPLPSCK

SEQ ID NO: 115 - protein, 330 aa, Prunus mume
  misc_feature: Public GI no. 58379372
  misc_feature (144)..(167): Pfam Name. LRR_1 Pfam Description. Leucine Rich Repeat
  misc_feature: The sequence is a funtional homolog of Ceres CLONE ID no. 5344 at SEQ ID NO. 87 with e-value of 1.09E-115 and BLAST sequence identity of 66.8
MDVKFPTLLCLTLLFTAILNPALSELCNQEDKKVLLQIKKAFNDPYVLTSWKPETDCCDWYCVTCDSTTNRINSLTIFAGQVSGQIPAQVGDLPYLETLEFHKQPNLTGPIQPSIVKLKSLKFLRLSWTNISGSVPDFLSQLKNLTFLDLSFSNLTGSIPSSLSQLPNLNALHLDRNKLTGHIPKSFGEFHGSVPELYLSHNQLSGNIPTSLAKLDFNRIDFSRNKLEGDASMIFGLNKTTQIVDLSRNLLEFNLSKVEFSKSLISLDLNHNKITGGIPVGLTQLDLQFLNVSYNRLCGQIPVGGKLQSFDSSTYFHNRCLCGAPLPSCK

SEQ ID NO: 116 - protein, 303 aa, Eucalyptus grandis
  misc_feature: Public GI no. 6651282
  misc_feature (119)..(142): Pfam Name. LRR_1 Pfam Description. Leucine Rich Repeat
  misc_feature: The sequence is a funtional homolog of Ceres CLONE ID no. 5344 at SEQ ID NO. 87 with e-value of 7.19E-105 and BLAST sequence identity of 66.4
EFNPDDKKVLLQIKKAFGDPYVLASWKSDTDCCDWYCVTCDSTTNRINSLTIFAGQVSGQIPALVGDLPYLETLEFHKQPNLTGPIQPAIAKLKGLKFLRLSWTNLSGSVPDFLSQLKNLTFLDLSFNNLTGAIPSSLSQLPNLNALHLDRNKLTGHIPKSFGQFIGNVPDLYLSHNQLSGNIPTSFAQMDFGKHRLSRNKLEDASVIFGLNKTTQIVDLSRNLLEFNLSKVEFPTSLTSLDVNHNKIYGSIPVEFTQLNFQFLNVSYNRLCGQIPVGGKLQSFNEYSYFHNRCLCGAPLHTA

SEQ ID NO: 117 - protein, 330 aa, Prunus mahaleb
  misc_feature: Public GI no. 8778050
  misc_feature (144)..(167): Pfam Name. LRR_1 Pfam Description. Leucine Rich Repeat
  misc_feature: The sequence is a funtional homolog of Ceres CLONE ID no. 5344 at SEQ ID NO. 87 with e-value of 4.39E-114 and BLAST sequence identity of 65.9
MDHKLSTLLCLTLLFSTILNPALSELCNPEDKKVLLQIKKAFNDPYVLTSWKPETDCCDWYCVTCDSTTNRINSLTIFAGQVSAQIPTQVGDLPYLETLEFHKQPNLTGPIQPSIAKLKSLKELRLSWTNISGSVPDFLSQLKNLTFLDLSFSNLTGSIPSSLSQLPNLNALRLDRNKLTGHIPKSFGEFHGSVPDLYLSHNQLSGTIPTSLAKLNFSTIDFSRNKLEGDASMIFGLNKTTQIVDLSRNLLEFNLSKVEFSKSLTSLDLNHNKITGGIPVGLTQLDLQFLNVSYNRLCGQIPVGGKLQSFDSSTYFHNRCLCGAPLPSCK

SEQ ID NO: 118 - protein, 330 aa, Prunus americana
  misc_feature: Public GI no. 57868641
  misc_feature (144)..(167): Pfam Name. LRR_1 Pfam Description. Leucine Rich Repeat
  misc_feature: The sequence is a funtional homolog of Ceres CLONE ID no. 5344 at SEQ ID NO. 87 with e-value of 1.20E-113 and BLAST sequence identity of 65.9
MDVKFPTLLCLTLLFSTILNPALSELCNPEDKKVLLQIKKAFNDPYVLTSWKPETDCCDWYCVTCDSTTNRINSLTIFAGQVSGQIPTQVGDLPYLETLEFHKQPNLTGPIQPSIAKLKRLKELRLSWTNISGSVPDFLSQLKNLTFLDLSFSNLTGSIPSSLSQLPNLNALRLDRNKLTGHIPKSFGEFHGSVPDLYLSHNQLSGTIPTSLAKLNFTTIDFSRNKLEGDASMIFGLNKTTQIVDLSRNLLEFNLSNVEFSKSLTSLDLNHNKITGGIPVGLTQLDLQFLNVSYNRLCGQIPVGGKLQSFDSSTYFHNRCLCGAPLPSCK

SEQ ID NO: 119 - protein, 330 aa, Prunus salicina
  misc_feature: Public GI no. 76365455
  misc_feature: The sequence is a funtional homolog of Ceres CLONE ID no. 5344 at SEQ ID NO. 87 with e-value of 3.10E-113 and BLAST sequence identity of 65.9
MDVKFPTLLCLTLLFSTILNPALSELCNPEDKKVLLQIKKAFNDPYVLTSWKPETDCCDWYCVTCDSTTNRINSLTIFAGQVSGQIPTQVGDLPYLETLEFHKQPNLTGPIQPSIAKLKLLKELRLSWTNISGSVPDFLSQLKNLTFLDLSFSNLTGSIPSSLSQLPNLNALRLERNKLTGHIPKSFGEFHGSVPDLYLSHNQLSGTIPTSLAKLNFTTIDFSRNKLEGDASMIFGLNKTTQIVDLSRNLLEFNLSNVEFSKSLTSLDLNHNKITGGIPVGLTKLDLQFLNVSYNRLCGQIPVGGKLQSFDSSTYFHNRCLCGAPLPSCK

SEQ ID NO: 120 - protein, 330 aa, Pyrus pyrifolia
  misc_feature: Public GI no. 33087508
  misc_feature (144)..(167): Pfam Name. LRR_1 Pfam Description. Leucine Rich Repeat
  misc_feature: The sequence is a funtional homolog of Ceres CLONE ID no. 5344 at SEQ ID NO. 87 with e-value of 1.49E-113 and BLAST sequence identity of 65.7
MELKFSTFLSLTLLFSSVLNPALSDLCNPDDKKVLLQIKKAFGDPYVLASWKSDTDCCDWYCVTCDSTTNRINSLTIFAGQVSGQIPALVGDLPYLETLEFHKQPNLTGPIQPAIAKLKGLKSLRLSWTNLSGSVPDFLSQLKNLTFLDLSFNNLTGAIPSSLSELPNLSALHLDRNKLTGHIPKSFGQFIGNVPDLYLSHNQLSGNIPTSFAQMDFTSIDLSRNKLEGDASVIFGLNKTTQIVDLSRNLLEFNLSKVEFPTSLTSLDINHNKIYGSIPVEFTQLNFQFLNVSYNRLCGQIPVGGKLQSFDEYSYFHNRCLCGAPLPSCK

SEQ ID NO: 121 - protein, 331 aa, Eucalyptus grandis
  misc_feature: Public GI no. 38234920
  misc_feature (144)..(167): Pfam Name. LRR_1 Pfam Description. Leucine Rich Repeat
  misc_feature: The sequence is a funtional homolog of Ceres CLONE ID no. 5344 at SEQ ID NO. 87 with e-value of 1.00E-112 and BLAST sequence identity of 65.7
MELKFSTFLSLTLLFSSVLNPALSDLCNPDDKKVLLQIKKAFGDPYVLASWKSDTDCCDWYCVTCDSTTNRINSLTIFAGQVSGQIPALVGDLPYLETLEFHKQPNLTGPIQPAIAKLKGLKSLRLSWTNLSGSVPDFLSQLKNLTFLDLSFNNLTGAIPSSLSELPNLGALRLDRNKLTGHIPISFGQFIGNVPDLYLSHNQLSGNIPTSFAQMDFTSIDLSRNKLEGDASVIFGLNKTTQIVDLSRNLLEFNLSKVEFPTSLTSLDINHNKIYGSIPVEFTQLNFQFLNVSYNRLCGQIPVGGKLQSFDEYSYFHNRCLCGAPLGPCKS

SEQ ID NO: 122 - protein, 330 aa, Pyrus communis
  misc_feature: Public GI no. 33087506
  misc_feature (144)..(167): Pfam Name. LRR_1 Pfam Description. Leucine Rich Repeat
  misc_feature: The sequence is a funtional homolog of Ceres CLONE ID no. 5344 at SEQ ID NO. 87 with e-value of 6.39E-113 and BLAST sequence identity of 65.7
MELKFSTFLSLTLLFSSVLNPALSDLCNPDDKKVLLQIKKAFGDPYVLASWKSDTDCCDWYCVTCDSTTNRINSLTIFAGQVSGQIPALVGDLPYLETLEFHKQPNLTGPIQPAIAKLKGLKSLRLSWTNLSGSVPDFLSQLKNLTFLDLSFNNLTGAIPSSLSELPNLGALRLDRNKLTGHIPISFGQFIGNVPDLYLSHNQLSGNIPTSFAQMDFTSIDLSRNKLEGDASVIFGLNKTTQIVDLSRNLLEFNLSKVEFPTSLTSLDINHNKIYGSIPVEFTQLNFQFLNVSYNRLCGQIPVGGKLQSFDEYSYFHNRCLCGAPLPSCK

SEQ ID NO: 123 - protein, 330 aa, Prunus salicina
  misc_feature: Public GI no. 63099931
  misc_feature (144)..(167): Pfam Name. LRR_1 Pfam Description. Leucine Rich Repeat
  misc_feature: The sequence is a funtional homolog of Ceres CLONE ID no. 5344 at SEQ ID NO. 87 with e-value of 6.39E-113 and BLAST sequence identity of 65.6
MDVKFPTLLCLTLLFSTILNPALSELCNPEDKKVLLQIKKAFNDPYVLTSWKPETDCCDWYCVTCDSTTNRINSLTIFAGQVSGQIPTQVGDLPYLETLEFHKQPNLTGPIQPSIAKLKLLKELRLSWTNISGSVPDFLSQLKNLTFLDLSFSNLTGSIPSSLSQLPNLNALRLDRNKLTGHIPKSFGEFHGSVPDLYLSHNQLSGTIPTSLAKLNFSTIDFSRNKLEGNASMIFGFNKTTQIVDLSRNLLEFNLSNVEFSKSLTSLDLNHNKITGGIPVGLTQLDLQFLNVSYNRLCGQIPVGGKLQSFDSSTYFHNRCLCGAPLPSCK

SEQ ID NO: 124 - protein, 330 aa, Pyrus communis
  misc_feature: Public GI no. 33087512
  misc_feature (144)..(167): Pfam Name. LRR_1 Pfam Description. Leucine Rich Repeat
  misc_feature: The sequence is a funtional homolog of Ceres CLONE ID no. 5344 at SEQ ID NO. 87 with e-value of 1.69E-112 and BLAST sequence identity of 65.4
MELKFSTFLSLTLLFSSVLNPALSDLCNPDDKKVLLQIKKAFGDPYVLASWKSDTDCCDWYCVTCDSTTNRINSLTIFAGQVSGQIPALVGDLPYLETLEFHKQPNLTGPIQPAIANLKGLKFLRLSWTNLSGSVPDFLSQLKNLTFLDLSFNNLTGAIPSSLSELPNLGALHLDRNKLTGHIPISFGQFIGNVPDLYLSHNQLSGNIPTSFAQMDFGSIDLSRNKLEGDASVIFGLNKTTQIVDLSRNLLEFNLSKVEFPTSLTSLDINHNKIYGSIPVEFTQLNFQFLNVSYNRLCGQIPVGGKLQSFDEYSYFHNRCLCGAPLPSCK

SEQ ID NO: 125 - protein, 330 aa, Pyrus hybrid cultivar
  misc_feature: Public GI no. 33087510
  misc_feature (144)..(167): Pfam Name. LRR_1 Pfam Description. Leucine Rich Repeat
  misc_feature: The sequence is a funtional homolog of Ceres CLONE ID no. 5344 at SEQ ID NO. 87 with e-value of 5.69E-112 and BLAST sequence identity of 65.4
MELKFSTFLSLTLLFSSVLNPALSDLCNPDDKKVLLQIKKAFGDPYVLASWKSDTDCCDWYCVTCDSTTNRINSLTIFAGQVSGQIPALVGDLPYLETLEFHKQPNLTGPIQPAIAKLKGLKFLRLSWTNLSGSVPDFLSQLKNLTFLDLSFNNLTGAIPSSLSELPNLDALRLDRNKLTGHIPISFGQFIGNVPDLCLSHNQLSGNIPTSFAQMDFGSIDLSRNKLEGDASVIFVLNKTTQIVDLSRNLLEFNLSKVEFPTSLTSLDINHNKIYGSIPVEFTQLNFQFLNVSYNRLCGQIPVGGKLQSFDEYSYFHNRCLCGAPLPSCK

SEQ ID NO: 126 - protein, 331 aa, Rubus idaeus
  misc_feature: Public GI no. 40732890
  misc_feature (144)..(167): Pfam Name. LRR_1 Pfam Description. Leucine Rich Repeat
  misc_feature: The sequence is a funtional homolog of Ceres CLONE ID no. 5344 at SEQ ID NO. 87 with e-value of 2.99E-106 and BLAST sequence identity of 65.2
MMDFKLFSLTLLFSTILTPALSELCNPKDKKVLFEIKTAFNNPYILSSWKSDADCCTDWYCVECDPTTHRINSLTIFTDNNLTGQIPAQVGDLPYLETLELRKLPHLTGPIQPSIAKLKHLKMLRLSWNGLSGSVPDFISQLKNLTFLELNFNKFTGSIPSSLSQLPNLGALHLDRNQLTGQIPSSFGKFVGTVPALFLSHNQLTGKIPTSFANMNFDQIDLSRNKLEGDASVIFGLNKTTQIVDLSRNMLEFDLSKVVFSTSLRAVDLNHNSITGSIPAQLTQLDDLVLFNVSYNRLCGKIPVGGKLQSLDTTSYFHNRCLCGAPLPSCK

SEQ ID NO: 127 - protein, 330 aa, Prunus armeniaca
  misc_feature: Public GI no. 2460188
  misc_feature (144)..(167): Pfam Name. LRR_1 Pfam Description. Leucine Rich Repeat
  misc_feature: The sequence is a funtional homolog of Ceres CLONE ID no. 5344 at SEQ ID NO. 87 with e-value of 5.69E-112 and BLAST sequence identity of 65.0
MDVKFPTLLCLTLLFSTILNPALSELCNPEDKKVLLQIKKAFNDPYVLTSWKPETDCCDWYCVTCDSTTNRINSLTIFAGQVSGQIPTQVGDLPYLETLEFHKQPNLTGPIQPSIAKLKLLKELRLSWTNISGSVPDFLSQLKNLTFLDLSFSNLTGSIPSWLSQLPNLNALRVDRNKLTGHIPKSFGEFDGSVPDLYLSHNQLSGTIPTSLAKLNFSTIDFSRNKLEGDASMIFGLNKTTQIVDLSRNLLEINLSNVEFSKSLTSLDLNHNKITGGIPVGLTQVDLQFLNVSYNRLCGQIPVGGKLQSFDSSTYFHNRCLCGAPLPSCK

SEQ ID NO: 128 - DNA, 987 bp, Populus balsamifera subsp. trichocarpa
  misc_feature: Ceres ANNOT ID no. 1534757
  misc_feature: The sequence is a funtional homolog of Ceres CLONE ID no. 5344 at SEQ ID NO. 87 with e-value of 5.29E-109 and BLAST sequence identity of 64.9
atgaatacccttttcctttccctactcatttccagtacccttctttcactctccctctcaaaagaactttgcaatccccaagataaacaggttctcctccaaatcaaaaaagattttggcgatccttacctcttagcctcatggaagtcagatactgattgctgcacagactggtaccaggttgagtgtgactccacaaccaaccgcatcatttctctcaccgtttttgctggcaacctttctggccaaatccccgctgcagttggggacttgccctatctccagaaccttgtgtttcgcaagctgactgatattacaggccccgtacagcccgccattgccaagctcgtacacctaacgtttctcagacttgacaggctaaatctcacagggacagtacctgactttctcagccagctcaagaatctcacatacttggacctctcttttaacggcttctctggatcaataccaagctcactagctttgctgccaaatcttggtgctcttcacttggacaggaacaagcttacgggctcgatcccagaatcatttggtacctttaaaggcagcgtaccggatctttacttgtctcacaaccaacttactggagaaatccctgcatcattagggaacatggacttcagcgtcattgatttatctcgcaacaaacttgttggtgatgcttccatgttatttgggctaaacaaaactactaataatgtgtatctctccaggaatctattcgaattcaatttgtcaaatgtggtatttccaagtaccatggaaaatctggacattaatcacaacaagattttcggtagcattcctccacaaatgactcagctacctttgcagtccctgaacgtgagttacaacaggctgtgtggccagattccggtaggtggtaagttgcagagctttgattactccacttatttccataacaggtgcttgtgcggagctccacttggaaactgcaaatag

SEQ ID NO: 129 - protein, 328 aa, Populus balsamifera subsp. trichocarpa
  misc_feature: Ceres ANNOT ID no. 1534757
  misc_feature (142)..(165): Pfam Name. LRR_1 Pfam Description. Leucine Rich Repeat
  misc_feature: The sequence is a funtional homolog of Ceres CLONE ID no. 5344 at SEQ ID NO. 87 with e-value of 5.29E-109 and BLAST sequence identity of 64.9
MNTLFLSLLISSTLLSLSLSKELCNPQDKQVLLQIKKDFGDPYLLASWKSDTDCCTDWYQVECDSTTNRIISLTVFAGNLSGQIPAAVGDLPYLQNLVFRKLTDITGPVQPAIAKLVHLTFLRLDRLNLTGTVPDFLSQLKNLTYLDLSFNGFSGSIPSSLALLPNLGALHLDRNKLTGSIPESFGTFKGSVPDLYLSHNQLTGEIPASLGNMDFSVIDLSRNKLVGDASMLFGLNKTTNNVYLSRNLFEFNLSNVVFPSTMENLDINHNKIFGSIPPQMTQLPLQSLNVSYNRLCGQIPVGGKLQSFDYSTYFHNRCLCGAPLGNCK

SEQ ID NO: 130 - protein, 330 aa, Malus x domestica
  misc_feature: Public GI no. 1679733
  misc_feature (144)..(167): Pfam Name. LRR_1 Pfam Description. Leucine Rich Repeat
  misc_feature: The sequence is a funtional homolog of Ceres CLONE ID no. 5344 at SEQ ID NO. 87 with e-value of 9.40E-112 and BLAST sequence identity of 64.8
MELKFSIFLSLTLLFSSVLKPALSDLCNPDDKKVLLQIKKAFGDPYVLTSWKSDTDCCDWYCVTCDSTTNRINSLTIFAGQVSGQIPALVGDLPYLETLEFHKQPNLTGPIQPAIAKLKGLKFLRLSWTNLSGSVPDFLSQLKNLTFLDLSFNNLTGAIPSSLSQLPNLNALHLDRNKLTGHIPKSLGQFIGNVPDLYLSHNQLSGNIPTSFAQMDFTSIDLSRNKLEGDASVIFGLNKTTQIVDLSRNLLEFNLSKVEFPTSLTSLDINHNKIYGSIPVEFTQLNFQFLNVSYNRLCGQIPVGGKLQSFDEYSYFHNRCLCGAPLPSCK

SEQ ID NO: 131 - DNA, 975 bp, Populus balsamifera subsp. trichocarpa
  misc_feature: Ceres ANNOT ID no. 1481274
  misc_feature: The sequence is a funtional homolog of Ceres CLONE ID no. 5344 at SEQ ID NO. 87 with e-value of 7.10E-98 and BLAST sequence identity of 64.3
atgaatacccttttcctttccctactcatttccagtacccttctttcactctccctctcaaaagaactttgcaatccccaagataaacaggttctcctccaaatcaaaaaagattttggcgatccttacctcttagcctcatggaagtcagatactgattgctgcacagactggtaccaggttgagtgtgactccacaaccaaccgcatcatttctctcaccgtttttgctggcaacctttctggccaaatccccgctgcagttggggacttgccctatctccagaaccttgtgtttcgcaagctgactgatattacaggccccgtacagcccgccattgccaagctcgtacacctaacgtttctcagacttgacaggctaaatctcacagggacagtacctgactttctcagccagctcaagaatctcacatacttggacctctcttttaacggcttctctggatcaataccaagctcactagctttgctgccaaatcttggtgctcttcacttggacaggaacaagcttacgggctcgatcccagaatcatttggtacctttaaaggcagcgtaccggatctttacttgtctcacaaccaacttactggagaaatccctgcatcattagggaacatggacttcagcgtcattgatttatctcgcaacaaacttgttggtgatgcttccatgttatttgggctaaacaaaactactaataatgtgtatctctccaggaatctattcgaattcaatttgtcaaatgtggtatttccaagtaccatggaaaatctggacattaatcacaacaagattttcggtagcattcctccacaaatgactcagctacctttgcagtccctgaacgtgagttacaacaggctgtgtggccagattccggtaggtggtgcttgtgcggagctccacttggaaactgcaaatagttcagcgggtaaagaagcatttccagtgtaa

SEQ ID NO: 132 - protein, 324 aa, Populus balsamifera subsp. trichocarpa
  misc_feature: Ceres ANNOT ID no. 1481274
  misc_feature (142)..(165): Pfam Name. LRR_1 Pfam Description. Leucine Rich Repeat
  misc_feature: The sequence is a funtional homolog of Ceres CLONE ID no. 5344 at SEQ ID NO. 87 with e-value of 7.10E-98 and BLAST sequence identity of 64.3
MNTLFLSLLISSTLLSLSLSKELCNPQDKQVLLQIKKDFGDPYLLASWKSDTDCCTDWYQVECDSTTNRIISLTVFAGNLSGQIPAAVGDLPYLQNLVFRKLTDITGPVQPAIAKLVHLTFLRLDRLNLTGTVPDFLSQLKNLTYLDLSFNGFSGSIPSSLALLPNLGALHLDRNKLTGSIPESFGTFKGSVPDLYLSHNQLTGEIPASLGNMDFSVIDLSRNKLVGDASMLFGLNKTTNNVYLSRNLFEFNLSNVVFPSTMENLDINHNKIFGSIPPQMTQLPLQSLNVSYNRLCGQIPVGGACAELHLETANSSAGKEAFPV

SEQ ID NO: 133 - protein, 333 aa, Vitis vinifera
  misc_feature: Public GI no. 21667647
  misc_feature (147)..(170): Pfam Name. LRR_1 Pfam Description. Leucine Rich Repeat
  misc_feature: The sequence is a funtional homolog of Ceres CLONE ID no. 5344 at SEQ ID NO. 87 with e-value of 1.09E-108 and BLAST sequence identity of 64.1
METSKLFLLSSSLLLVLLATRPCPSLSERCNPKDKKVLLQIKKALDNPYILASWNPNTDCCGWYCVECDLTTHRINSLTIFSGQLSGQIPDAVGDLPFLETLIFRKLSNLTGQIPPAIAKLKHLKMVRLSWTNLSGPVPAFFSELKNLTYLDLSFNNLSGPIPGSLSLLPNLGALHLDRNHLTGPIPDSFGKFAGSTPYLYLSHNQLSGKIPYSFRGFDPTVMDLSRNKLEGDPSIFFNANKSTQIVDFSRNLFQFDLSRVEFPKSLTSLDLSHNKIAGSLPEMMTSLDLQFLNVSYNRLCGKIPVGGKLQSFDYDSYFHNRCLCGAPLQSCK

SEQ ID NO: 134 - DNA, 984 bp, Populus balsamifera subsp. trichocarpa
  misc_feature: Ceres ANNOT ID no. 1528311
  misc_feature: The sequence is a funtional homolog of Ceres CLONE ID no. 5344 at SEQ ID NO. 87 with e-value of 1.49E-106 and BLAST sequence identity of 64.1
atgaaaacccttttcctttcccttgtcatttccactcttctttcactctccctctcaaaagaactttgcaattcccatgacaaaaaggttctcctacaaatcaaaaaacattttggcgatccatacctcttagcttcatggaaatcggacactgattgctgcaaggcttggtaccaagttgagtgtgattccacctccaaccgcatcatttctctcacaatttttgctggcaacctttctggccaaatccccgctgcagttggggacttgccctatctccagacccttgtattccgcaagctgacagatgttacaggccccatacaacctgccattgccaagctcgtacacttaaattttctcagacttgaccggctaaatctcactgggacagtacctggctttcttagcaaactcaagaagctcacattcttggacttgtcttttaacggcctctctggatcaataccgagctcactagctttgctgccaaatcttggtgctcttcacttggacaggaacaggctgacaggttcaatcccagaatcatttgggacatttaaaggcagcgtaccggatctttacctgtctcacaaccaacttactggtgaaatccctgcatcattagggaacatggacttcagcgtcattgatttatcacgcaacaagcttgttggtgatgcttccatgctatttgggctgaacaaaactactcgaaatgtgtatctctctaggaatatattgaacttcaatttgtcaaatgtgacgtttccaagtggcttggaaaatctggacattagtcacaacaagattttcggaagcatacctccacaaatgactcagatacctttgcagtccctgaacatgagttacaacaggctgtgtggccagattcctgtaggtggtaagctgcagagctttgataacttcacatatttccataataggtgcttgtgcggggttccccttgaaaactgcaaatag

SEQ ID NO: 135 - protein, 327 aa, Populus balsamifera subsp. trichocarpa
  misc_feature: Ceres ANNOT ID no. 1528311
  misc_feature (141)..(164): Pfam Name. LRR_1 Pfam Description. Leucine Rich Repeat
  misc_feature: The sequence is a funtional homolog of Ceres CLONE ID no. 5344 at SEQ ID NO. 87 with e-value of 1.49E-106 and BLAST sequence identity of 64.1
MKTLFLSLVISTLLSLSLSKELCNSHDKKVLLQIKKHFGDPYLLASWKSDTDCCKAWYQVECDSTSNRIISLTIFAGNLSGQIPAAVGDLPYLQTLVFRKLTDVTGPIQPAIAKLVHLNFLRLDRLNLTGTVPGFLSKLKKLTFLDLSFNGLSGSIPSSLALLPNLGALHLDRNRLTGSIPESFGTFKGSVPDLYLSHNQLTGEIPASLGNMDFSVIDLSRNKLVGDASMLFGLNKTTRNVYLSRNILNFNLSNVTFPSGLENLDISHNKIFGSIPPQMTQIPLQSLNMSYNRLCGQIPVGGKLQSFDNFTYFHNRCLCGVPLENCK

SEQ ID NO: 136 - protein, 327 aa, Lycopersicon esculentum
  misc_feature: Public GI no. 469457
  misc_feature (140)..(163): Pfam Name. LRR_1 Pfam Description. Leucine Rich Repeat
  misc_feature: The sequence is a funtional homolog of Ceres CLONE ID no. 5344 at SEQ ID NO. 87 with e-value of 9.99E-108 and BLAST sequence identity of 64.0
MNLSLLLVVIFLCFASPSLSVRCNPKDKKVLLQIKKDLGNPYHLASWDPNTDCCYWYVIKCDRKTNRINALTVFQANISGQIPAAVGDLPYLETLEFHHVTNLTGTIPPAIAKLTNLKMLRLSFTNLTGPIPEFLSQLKNLTLLELNYNQFTGTIPSSLSQLPNLLAMYLDRNKLTGTIPESFGRFKGPNIPDLYLSHNSLTGHVPASLGDLNFSTLDFSRNKLEGDVSFLFGKNKTSQVIDLSRNLLEFDISKSEFAESLISLDLNHNRIFGSLPPGLKDVPLQFFNVSYNRLCGQIPQGGTLQSFDIYSYLHNKCLCGSPLPKCK

SEQ ID NO: 137 - protein, 333 aa, Vitis vinifera
  misc_feature: Public GI no. 13172312
  misc_feature (147)..(170): Pfam Name. LRR_1 Pfam Description. Leucine Rich Repeat
  misc_feature: The sequence is a funtional homolog of Ceres CLONE ID no. 5344 at SEQ ID NO. 87 with e-value of 1.39E-108 and BLAST sequence identity of 63.8
METSKLFLLSSSLLLVLLATRPCPSLSERCNPKDKKVLLQIKKALDTPYILASWNPNTDCCGWYCVECDLTTHRINSLTIFSGQLSGQIPDAVGDLPFLETLIFRKLSNLTGQIPPAIAKLKHLKMVRLSWTNLFGPVPAFFSELKNLTYLDLSFNNLSGPIPGSLSLLPNLGALHIDRNHLTGPIPDSFGKFAGSTPGLHLSHNQLSGKIPYSFRGFDPNVMDLSRNKLEGDLSIFFNANKSTQIVDFSRNLFQFDLSRVEFPKSLTSLDLSHNKIAGSLPEMMTSLDLQFLNVSYNRLCGKIPVGGKLQSFDYDSYFHNRCLCGAPLQSCK

SEQ ID NO: 138 - protein, 326 aa, Cucumis melo
  misc_feature: Public GI no. 30984105
  misc_feature (140)..(163): Pfam Name. LRR_1 Pfam Description. Leucine Rich Repeat
  misc_feature: The sequence is a funtional homolog of Ceres CLONE ID no. 5344 at SEQ ID NO. 87 with e-value of 2.20E-103 and BLAST sequence identity of 63.0
MHSHNLLLLLFFFFTVSFAELCHPNDKEVLLNIKKAFNNPYILTSWKPEEDCCTWYCVECDLKSHRIIALTIFADDELSGPIPPFVGDLPFLENLMFHKLPNLTGPIPPTIAKLHNLKYLDLSWNGLSGPIPSFLGSLSNLDILDLSFNRFTGSIPSSLANLRRLGTLHLDRNKLTGPIPDSFGNFKGKVPYLYLSHNQLSGKIPTSMGKVDFNYIDLSRNKLVGDGSLIFGSKKTTEIVDLSRNLLEFNISKVVFPRTLTWLDLNHNKIFGEIPTGVVKLELQMLNVSYNALCGRIPMGGKLQSFDVYSYFHNKCLCGKPLGSCK

SEQ ID NO: 139 - DNA, 996 bp, Populus balsamifera subsp. trichocarpa
  misc_feature: Ceres ANNOT ID no. 1474878
  misc_feature: The sequence is a funtional homolog of Ceres CLONE ID no. 5344 at SEQ ID NO. 87 with e-value of 2.20E-94 and BLAST sequence identity of 62.8
atgaaaacccttttcctttcccttgtcatttccactcttctttcactctccctctcaaaagaactttgcaattcccatgacaaaaaggttctcctacaaatcaaaaaacattttggcgatccatacctcttagcttcatggaaatcggacactgattgctgcaaggcttggtaccaagttgagtgtgattccacctccaaccgcatcatttctctcacaatttttgctggcaacctttctggccaaatccccgctgcagttggggacttgccctatctccagacccttgtattccgcaagctgacagatgttacaggccccatacaacctgccattgccaagctcgtacacttaaattttctcagacttgaccggctaaatctcactgggacagtacctggctttcttagcaaactcaagaagctcacattcttggacttgtcttttaacggcctctctggatcaataccgagctcactagctttgctgccaaatcttggtgctcttcacttggacaggaacaggctgacaggttcaatcccagaatcatttgggacatttaaaggcagcgtaccggatctttacctgtctcacaaccaacttactggtgaaatccctgcatcattagggaacatggacttcagcgtcattgatttatcacgcaacaagcttgttggtgatgcttccatgctatttgggctgaacaaaactactcgaaatgtgtatctctctaggaatatattgaacttcaatttgtcaaatgtgacgtttccaagtggcttggaaaatctggacattagtcacaacaagattttcggaagcatacctccacaaatgactcagatacctttgcagtccctgaacatgagttacaacaggctgtgtggccagattcctgtaggtggtgcttgtgcggggttccccttgaaaactgcaaataggccagtggaaaaggaagcattttccactgtgaataaggatttgcaatatttctga

SEQ ID NO: 140 - protein, 331 aa, Populus balsamifera subsp. trichocarpa
  misc_feature: Ceres ANNOT ID no. 1474878
  misc_feature (141)..(164): Pfam Name. LRR_1 Pfam Description. Leucine Rich Repeat
  misc_feature: The sequence is a funtional homolog of Ceres CLONE ID no. 5344 at SEQ ID NO. 87 with e-value of 2.20E-94 and BLAST sequence identity of 62.8
MKTLFLSLVISTLLSLSLSKELCNSHDKKVLLQIKKHFGDPYLLASWKSDTDCCKAWYQVECDSTSNRIISLTIFAGNLSGQIPAAVGDLPYLQTLVFRKLTDVTGPIQPAIAKLVHLNFLRLDRLNLTGTVPGFLSKLKKLTFLDLSFNGLSGSIPSSLALLPNLGALHLDRNRLTGSIPESFGTFKGSVPDLYLSHNQLTGEIPASLGNMDFSVIDLSRNKLVGDASMLFGLNKTTRNVYLSRNILNFNLSNVTFPSGLENLDISHNKIFGSIPPQMTQIPLQSLNMSYNRLCGQIPVGGACAGFPLKTANRPVEKEAFSTVNKDLQYF

SEQ ID NO: 141 - protein, 325 aa, Daucus carota
  misc_feature: Public GI no. 20066308
  misc_feature (117)..(140): Pfam Name. LRR_1 Pfam Description. Leucine Rich Repeat
  misc_feature: The sequence is a funtional homolog of Ceres CLONE ID no. 5344 at SEQ ID NO. 87 with e-value of 7.29E-89 and BLAST sequence identity of 58.4
MNLQLLLVIIFSCFASPSRSERCNPKDKKVLLQIKKDNDNPYHLASWDPNTDHCYWYVIKCDRKTNRINALTVFQANISGQIPAFVGDLPYDLETLEFHHVTNLTITIPPAIAKLTNLKMLRLSFTNLTGPIPEFLSQLKNLTLLELNYCQFTHTIPYSLSQLPNLLLDRNKLTGTIPESFGRFKGPNIPDFWLYLSHNSLTGHVFASLGDLHFSTLFFSRNKTEVEFLFGKNKTSQTIDLSCRLLEFDISKSEFAELLTSLDLNHNLIFGSLPPGLKDVHMQFFNVSYNRLCGQIPRGGTLQSFDQYSYLHNKLLCGSPLPKCK

SEQ ID NO: 142 - protein, 329 aa, Antirrhinum majus
  misc_feature: Public GI no. 444011
  misc_feature (143)..(166): Pfam Name. LRR_1 Pfam Description. Leucine Rich Repeat
  misc_feature: The sequence is a funtional homolog of Ceres CLONE ID no. 5344 at SEQ ID NO. 87 with e-value of 3.29E-93 and BLAST sequence identity of 56.7
MKITFLLVLSLLALFSQPFLSQAERCHPQDKRVLLKIKKAFNNPYHLASWIPDTDCCSWYVVECDRTTNRINDFHLFSASVSGQIPETIAELPFLESLMFRKITNLTGTIPHAITRLTRLRSLTISWTNISGPVPAFLSELKNLTSLDLSFNNLSGSIPPSLIQLRNLNDMRLDRNKLTGNIPESFGNLTPSLQYLYLSHNQLSGIPRALGDLNLTSIELQRNRLEGDVSFMFGRNKTIQYADFSRNMLQFDLSHVEFPDSLSSLDLNHNRITGSLPEGLTKLESLYNLNVSYNRLCGKIPVGGKLQELDYTAYFHNRCLCGAPLPDCK

SEQ ID NO: 143 - protein, 340 aa, Triticum aestivum
  misc_feature: Ceres CLONE ID no. 784385
  misc_feature (152)..(175): Pfam Name. LRR_1 Pfam Description. Leucine Rich Repeat
  misc_feature: The sequence is a funtional homolog of Ceres CLONE ID no. 5344 at SEQ ID NO. 87 with e-value of 1.10E-78 and BLAST sequence identity of 52.4
MRMRSRALLVLLLCSLLAGAANAEPSPDPTYKDCHPGDKAALLAVKAALGEAYHFASWTPDSPCCDWYDVTCDHFTGRVVGLAVFQDANLTGTIPSALAGLPHLQDLTLRHLPALSGPIPPAIGKLSNLSSLRISWTAVSGPVPSFLGALKKLTFLELSFNSLSGAIPASLGTISNLSGINLSRNRLTGAIPPMFLSKFADQVYLWLSHNNLTGPVPAGFASVNFAHLDLSRNDLTGDASGLFGRGKELQYIDLSRNAFDFDLSGVVLPEQLYFVDVSHNAIHGSIPAQVANLSNLQFFNVSYNKLCGPVPTGGNMARFDLYNFQHNKCLCGAPLPACKK

SEQ ID NO: 144 - protein, 335 aa, Phaseolus vulgaris
  misc_feature: Public GI no. 55859509
  misc_feature (147)..(170): Pfam Name. LRR_1 Pfam Description. Leucine Rich Repeat
  misc_feature: The sequence is a funtional homolog of Ceres CLONE ID no. 5344 at SEQ ID NO. 87 with e-value of 6.29E-74 and BLAST sequence identity of 48.1
MARLSIIVLVIMVLVLRTALSELCNPQDKQALLQIKKDLGNPTTLSSWLPNTDCCKPEWEGVSCDTDTKSYRVNILDLNGLSLTKPYPIPSSVGNLPYLGSLYISRMNNLVGSIPPSIAKLTKLGFIRISHTNVSGQIPNFLSQMKSLITIDFSYNALSGTLPPSLSSLPNLVGISLDGNRISGTIPGSFGSFPKHFTVLTLSRNRLTGNIPTTLAKLGLSFVDLSENMLEGDASVLFGANKNLRKIDLAKNLLAFDLGKISLRSKNLEGLDLRKNRIYGTLPKVLTSLKYLRTLNVSYNNLCGQIPQGGKLQRFSEYCYAHNKCLCGSPLPPCT

SEQ ID NO: 145 - protein, 337 aa, Phaseolus vulgaris
  misc_feature: Public GI no. 50871748
  misc_feature (147)..(170): Pfam Name. LRR_1 Pfam Description. Leucine Rich Repeat
  misc_feature: The sequence is a funtional homolog of Ceres CLONE ID no. 5344 at SEQ ID NO. 87 with e-value of 2.50E-72 and BLAST sequence identity of 47.3
MARLSITVLVIMVLVLRTALSELCNPQDKEALLQIKKDLGNPTTLSSWLPNTDCCKPEWEGVSCDIDTKTYRVNSLDLNDLSLTKPYPIPSSVANLPYLSFLYISRINNLVGPIPPSIAKLTKLRFLYITHTNVSGQIPNFLSQMKTLITIDFSYNALSGTLPPSLSSLPNLLGISLDGNRISGTIPGSFGSFPKHFTVLTLSRNRLTGNIPATLAKLELAFVDLSENMLEGDASVLFGANKVNLQKINLAKNLLAFDLGKIRLSKSKDLEGLDLRNNRIYGTLPKVLTSLKYLKSLNVSYNNLCGQIPQGGKLQRFDESSYAHNKCLCGSPLPSCT

SEQ ID NO: 146 - protein, 337 aa, Phaseolus vulgaris
  misc_feature: Public GI no. 55859507
  misc_feature (147)..(170): Pfam Name. LRR_1 Pfam Description. Leucine Rich Repeat
  misc_feature: The sequence is a funtional homolog of Ceres CLONE ID no. 5344 at SEQ ID NO. 87 with e-value of 2.50E-72 and BLAST sequence identity of 47.3
MARLSITVLVIMVLVLRTALSELCNPQDKQALLQIKKDLGNPTTLSSWLPNTDCCKPEWEGVSCDIDTKTYRVNSLDLNDLSLTKPYPIPSSVANLPYLSFLYISRINNLVGPIPPSIAKLTKLRFLYITHTNVSGQIPNFLSQMKTLITIDFSYNALSGTLPPSLSSLPNLLGISLDGNRISGTIPGSFGSFPKHFTVLTLSRNRLTGNIPATLAKLELAFVDLSENMLEGDASVLFGANKVNLQKINLAKNLLAFDLGKIRLSKSKDLEGLDLRNNRIYGTLPKVLTSLKYLKSLNVSYNNLCGQIPQGGKLQRFDESSYAHNKCLCGSPLPSCT

SEQ ID NO: 147 - DNA, 1363 bp, Arabidopsis thaliana
  misc_feature: Ceres CDNA ID no. 23649975
  misc_feature: Ceres SEED LINE ME11273
  misc_feature: Ceres ANNOT ID no. 828248
  misc_feature: The sequence encodes the protein given in SEQ ID NO. 148
  misc_feature: The sequence encodes the protein given in SEQ ID NO. 360
atgctgttttccaataaagttaattctctaacagaacaagtttcgagattggatattgacgacaacgatatgggacttggaggtagtgaaacaatggaatgcaagtgtggtatgcctctgtgtatctgtgtagctcctcccaaatcaactgataaaccaaacccacctgtaaaaacttcatttcctcaagtttgtgttcctgacaaaatacgtttctcgcttttgaatattgcttttggaacaggctaccattgctcctgtggttcttcctcagttgaagtcagaggcttcagcaaaaagtaaaggttccacttccagcagcaatgctaggtatgttatcatttagtcgtagtatcaaggcaaaagtttgtgtctagagtttacttcataagctttacacatgtgagaaagttgtttgtctaggcattttcatttactttattagggcaaggaagtatcaacatgaaatttgcttgctcttgcatttcagctggaccgatcaaatcactcgtactttctccttttcgtgcaattgtgtagaaaatttgcttcccatattcgttgttgtggcaactgacaaatgatattgaaatatctctcgttgccgttatatatcttttaagctgttttgatttgtaaataagctgttgaaaaactcagatcagctctaaatgctggactagacaccccccaaagagactatgaagccagtggggaggtaactcttgacatttcattacataaataaaccatagtttactgtttctaacagagcattattgattttatggaatttgtttgttaaaagggattaagagaagcgattaagaatggtgacagtgctggtgcgaaaaagcttctaaaagaggtacttaatctcctaattaagaagctgcgcttaattaagtgtatagagagaggttaaaactctaggagttgcagggcgtagatgcaaattaccgagacaggcaaggaatgtcggtgcttcatctggtaatcttcccactcctcatgtgtgattgatttgcttaagtaattcggaaatatactaataacataatcttatacttccacaggctgtcctgttcaaccaaactgatattgcgttgatgttgatggatcatggagcaagccttgagtacaagaatgcacaaggtaattctcatgctacgcaaatcttaccaaatcaatgacctgcgaaaaacatgttaaggagaacaagtgtagttagttacataggaacttctctggtttcgttcgcctaaagtatataaactgttatgcgtcaccaggagaaacaccgctagattgtgccccggcaacactgcaatacaagatgcgggaaaagatgaagtccacttaa

SEQ ID NO: 148 - protein, 190 aa, Arabidopsis thaliana
  misc_feature: Ceres CDNA ID no. 23649975
  misc_feature: LOCUS ID no. At2g26210
  misc_feature: Ceres SEED LINE ME11273
  misc_feature: Ceres ANNOT ID no. 828248
  misc_feature (134)..(166): Pfam Name. Ank Pfam Description. Ankyrin repeat
MLFSNKVNSLTEQVSRLDIDDNDMGLGGSETMECKCGMPLCICVAPPKSTDKPNPPATIAPVVLPQLKSEASAKSKGSTSSSNARSALNAGLDTPQRDYEASGEGLREAIKNGDSAGAKKLLKEGVDANYRDRQGMSVLHLAVLFNQTDIALMLMDHGASLEYKNAQGETPLDCAPATLQYKMREKMKST

SEQ ID NO: 149 - protein, 164 aa, Brassica napus
  misc_feature: Ceres CLONE ID no. 948978
  misc_feature (108)..(140): Pfam Name. Ank Pfam Description. Ankyrin repeat
  misc_feature: The sequence is a funtional homolog of Ceres ANNOT ID no. 828248 at SEQ ID NO. 148 with e-value of 3.30E-61 and BLAST sequence identity of 83.0
MGPGDSEAVECKCGMPLCICVVAPPKTSNPQATRAPPMALPQSDPKPKSDTSAKSKGSTSSTNARPDKPQKDYEVTGEGLREAIKNGDTAGVKKLLSEGVDANYHDKQGMSVLHLAVLFNQTDIALMLMEHGASLDYKNAQGETPLDCAPATLQYKMREKMKST

SEQ ID NO: 150 - DNA, 1371 bp, Arabidopsis thaliana
  misc_feature: Ceres CDNA ID no. 12703936
  misc_feature: Ceres SEED LINE ME11278
  misc_feature: Ceres ANNOT ID no. 569483
  misc_feature: The sequence encodes the protein given in SEQ ID NO. 151
atggagcctgaacgtttaaaatttggaggtacattggtttcgaatttggagcttcttcagttcgtgaagttattttttttgtagctcgttgtcctttgttttcccctttggctcaccttgaggtcaatgtgttgtttgtttcaagtgcaggtccaagagagttgtgcggtgctgcggatcttatatctcaattcaaactagtgcaacaccatgaattcttttgcaagaaatctcttcctgtttctttatcagattcccattatcttcataatgtggttggggacacagagatcagaaaaggagaaggaatgcaattagatcagcttattgagagcatatcacagagccgggagactaatattcgcatccagccttttgatatagatgagcttcaggagtctttccaactaaatgatatgactcctgttgaattacccccagtaagaatctgatctttctcactctctcttggtgttttgagttttaaatgtccttcttttcataagagtaacagtatttgccattacattgaacttaaaaactggctcagtaatgaatgtcctatttcctgtaacatcaagttctttggttaattgagaatctttccctagtaatgtgaattacatctgggtgtcctatggagatgattgaccttggtactattcttctttcaggcagagaagggagctcctacaattccgtctaagtcaaaaagtgagtcgaaagatagggacaggaaacataagaaacacaaggacagggataaagacaaagatagagagcataagaagcacaagcacaaacataaagatagaagcaaagataaagataaagacaaggaccgagacagaaagaaggacaaaaatggccaccatgattcgggtgatcattctaagaaacatcatgataaggtaaagaacatgtctgtttgttgaaggtgtctgtctttccaaagaagaatagcttaatggaaagttttgtatttgttgctcttgagttaggctgcttttttgacctgcttggcatgaaattagcagatctagagactgctctagaacattttattgagtttttatggagccttttcacttatatttcagaaaaggaaacacgatggagatgaagatcttaatgacgttcagaggcacaaaaaaaacaaggtaatggtaatgaagtggggcctcaaatttttctcgttcttcattaacactcaacatgaaatttccaccataatgttttttttgcacaaaggtgctagagaactagtaatatgtctttgataaattgtattgattcagctcttgattgaacctgttgcagcataaaagctcaaagcttgatgaggtgggtgcaataagggttgctggctaa

SEQ ID NO: 151 - protein, 221 aa, Arabidopsis thaliana
  misc_feature: Ceres CDNA ID no. 12703936
  misc_feature: LOCUS ID no. At5g12230
  misc_feature: Ceres SEED LINE ME11278
  misc_feature: Ceres ANNOT ID no. 569483
MEPERLKFGGPRELCGAADLISQFKLVQHHEFFCKKSLPVSLSDSHYLHNVVGDTEIRKGEGMQLDQLIESISQSRETNIRIQPFDIDELQESFQLNDMTPVELPPAEKGAPTIPSKSKSESKDRDRKHKKHKDRDKDKDREHKKHKHKHKDRSKDKDKDKDRDRKKDKNGHHDSGDHSKKHHDKKRKHDGDEDLNDVQRHKKNKHKSSKLDEVGAIRVAG

SEQ ID NO: 152 - DNA, 666 bp, Populus balsamifera subsp. trichocarpa
  misc_feature: Ceres ANNOT ID no. 1488415
  misc_feature: The sequence is a funtional homolog of Ceres ANNOT ID no. 569483 at SEQ ID NO. 151 with e-value of 9.80E-85 and BLAST sequence identity of 74.5
atggatccagaaagcaagaagtttggaagaggaccaagagagctgactggtgccgttgatcttataagtcacttcaaattgttgccccaccatgaatttttctgcaagaggtcactacctttgtcaattgcagacacgcattatcttcacaatgtggtgggagacactgaaataagaaaaggagaagggatgcaactggatcagcttatccagaatacctccagagatagtaatgcacacatagagccctttgacctagatgtacttagggaggccttccaactgaaggaaactactcctatagatttgccttctgcagagaaggggactcctaccatagccgggaaatcaaaagttgagtccaaggacaaggataggaagcataaaaaacacaaagaaagagataaggagaaggagaaggagaaggagcacaagaaacgtaaacaccgtcataaagataaagatcgaagtaaagacaaagacaaggagaagaagaaggatagaagtggacatcatgattctggtgctgaccattccaaaaaacaccacgataagaaaaggaagcatgatggagatgaagatctcaatgatgtgcacaagcacaaaaaaagtaagcataagagctcaaagattgatgaaattggtgtgataaaggtagcaggctga

SEQ ID NO: 153 - protein, 221 aa, Populus balsamifera subsp. trichocarpa
  misc_feature: Ceres ANNOT ID no. 1488415
  misc_feature: The sequence is a funtional homolog of Ceres ANNOT ID no. 569483 at SEQ ID NO. 151 with e-value of 9.80E-85 and BLAST sequence identity of 74.5
MDPESKKFGRGPRELTGAVDLISHFKLLPHHEFFCKRSLPLSIADTHYLHNVVGDTEIRKGEGMQLDQLIQNTSRDSNAHIEPFDLDVLREAFQLKETTPIDLPSAEKGTPTIAGKSKVESKDKDRKHKKHKERDKEKEKEKEHKKRKHRHKDKDRSKDKDKEKKKDRSGHHDSGADHSKKHHDKKRKHDGDEDLNDVHKHKKSKHKSSKIDEIGVIKVAG

SEQ ID NO: 154 - DNA, 657 bp, Populus balsamifera subsp. trichocarpa
  misc_feature: Ceres ANNOT ID no. 1460393
  misc_feature: The sequence is a funtional homolog of Ceres ANNOT ID no. 569483 at SEQ ID NO. 151 with e-value of 7.70E-85 and BLAST sequence identity of 73.2
atgagatggtgcccttttgaaatttcaggaccaagagagctgactggtgctgttgatcttataagtcattacaagctgttgccccattacgaatatttctgcaagcggtcacttcctttgtcaattgctgacacacattatcttcacaatgtggtgggagacactgaaattaggaaaggagaagggatgcaattggatcagcttatccaaaatacctccagagatagtaatgcacgcatacagccctttgacttgaatgtacttagagaggccttccaactgaaggaaactactcccatagatttgccttctgcagagaaggggactccgaccatagctgggaaatcaaaaggtgagtccaaggacaaggataggaagcataaaaaacaaaaagacagagataaggagaaggataaagagcataagaaacataaacgccgtcataaagataaagatcggagtaaagacaaagacaaggagaagaagaaggatagaagtgggcatcatgattctggtgctgatcactccaaaaaacaccacgaaaagaaaaggaagcatgatggggatgaagatcttaatgatgtgcataagcacaaaaaaagtaagcataagagctcaaagattgatgaaatcggtgtgataaaggtagcaggctga

SEQ ID NO: 155 - protein, 218 aa, Populus balsamifera subsp. trichocarpa
  misc_feature: Ceres ANNOT ID no. 1460393
  misc_feature: The sequence is a funtional homolog of Ceres ANNOT ID no. 569483 at SEQ ID NO. 151 with e-value of 7.70E-85 and BLAST sequence identity of 73.2
MRWCPFEISGPRELTGAVDLISHYKLLPHYEYFCKRSLPLSIADTHYLHNVVGDTEIRKGEGMQLDQLIQNTSRDSNARIQPFDLNVLREAFQLKETTPIDLPSAEKGTPTIAGKSKGESKDKDRKHKKQKDRDKEKDKEHKKHKRRHKDKDRSKDKDKEKKKDRSGHHDSGADHSKKHHEKKRKHDGDEDLNDVHKHKKSKHKSSKIDEIGVIKVAG

SEQ ID NO: 156 - protein, 222 aa, Glycine max
  misc_feature: Ceres CLONE ID no. 524650
  misc_feature: The sequence is a funtional homolog of Ceres ANNOT ID no. 569483 at SEQ ID NO. 151 with e-value of 5.99E-78 and BLAST sequence identity of 68.8
  misc_feature (53)..(53): Xaa can be any naturally occurring amino acid
  misc_feature (108)..(108): Xaa can be any naturally occurring amino acid
MDPEGKKFGGGPRELTGAVDLISHFKLLPHYEFFCKRPLPVSIADTHYLHNVXRRHRNKKRRWDAIGSTYSESSFRDTNARIQPFDLDVLKEAFQLRETAPIDLPAAXKGIPTIAGKSKSENKDKEKKHKKHKDKDKDKDREHKKHKHRHKDRSKDKDKDKDRDKKKDKSGHRDSSADHSKKHHEKKRKHDGDDDVNDVHKHKKSKHKSSKIDELGAIKVAG

SEQ ID NO: 157 - protein, 218 aa, Zea mays
  misc_feature: Ceres CLONE ID no. 237720
  misc_feature: The sequence is a funtional homolog of Ceres ANNOT ID no. 569483 at SEQ ID NO. 151 with e-value of 5.40E-77 and BLAST sequence identity of 68.4
MDSDDKKFGNGPRELTGAVDLINHYKLLPHHDFFCKKPLPLAISDTHYLHNIVGDTEIRKGEGMELDQLVQNAYMRDKPAYIQPFDMETLGQAFQLRETAPVVLPSTEKGIPTISGKPKSESKDKEKKHKKHKDRERDKDKEHKKHKHRHKDRSKDKDKDKDKDKKKDKSGHHDSDSKKHHEKKRKHEGTEDSADVHKHKKSKHKSSKTDEMGNGLIS

SEQ ID NO: 158 - protein, 205 aa, Zea mays
  misc_feature: Ceres CLONE ID no. 465517
  misc_feature: The sequence is a funtional homolog of Ceres ANNOT ID no. 569483 at SEQ ID NO. 151 with e-value of 4.90E-67 and BLAST sequence identity of 68.0
MDSDDKKFGNGPRELTGAVDLISHYKLLPHHDFFCKKPLPLAISDTHYLHNVVGDTEIRKGEGMELDQLVHNAYLRDKPAYIQPFDMETLGQAFQLRETALVDLPSTEKGIPTISGKPKSESKDKEKKHKRHKDKDKEHKKHKHRHKDRSKDKDKDKDKDKKKDKSGHHEKKRKHEGTEDSVDVHKHKKSKHKSSKTDEMGNGVS

SEQ ID NO: 159 - protein, 233 aa, Triticum aestivum
  misc_feature: Ceres CLONE ID no. 703914
  misc_feature: The sequence is a funtional homolog of Ceres ANNOT ID no. 569483 at SEQ ID NO. 151 with e-value of 8.49E-63 and BLAST sequence identity of 63.7
MSGSNQMASDGKFGKGPRELTGAVDLISRYRLLNHHSFFCKKPLPLAISDTHYLQNVVGDTEIRKGEGMEIDQLIQNPDLREKKTAYIQPFDMETLGHAFQLRETAPVDLPSAEKGTPTISGKSKVKSRDKVKKHKKHKEKDKDKEHKKHKHRHKDRSKDKDKDKEKEKEKEKEKEKEKDKDKDKEKKKEKSVHHDLGGDNSKKHHEKKRKHDGMENLAAVRNHKKTQKRKIQ

SEQ ID NO: 160 - protein, 220 aa, Oryza sativa subsp. japonica
  misc_feature: Public GI no. 50881429
  misc_feature: The sequence is a funtional homolog of Ceres ANNOT ID no. 569483 at SEQ ID NO. 151 with e-value of 1.99E-63 and BLAST sequence identity of 62.1
MSGFNRMGSDGNFGKGPRELTGAVDLISRYKLLNHHSFFCKKPLPLAISDTNYLHNVVGDTEIRKGEGMELDQLFQDAYLREKTSYIQPFDMETLGQAFQLRETAPIDLPSAEKGTPTISGKSKIKSKDKVKKHKRHKEKDKDKYKDQKKHKHRHKDRSKDKEKEKEKEKEKEKKKDKSAHHDSGADRSKKHHEKKRKQEGLEDLASGHNPKKVQKRKNQ

SEQ ID NO: 161 - DNA, 801 bp, Arabidopsis thaliana
  misc_feature: Ceres CDNA ID no. 12706677
  misc_feature: Ceres SEED LINE ME11822
  misc_feature: Ceres ANNOT ID no. 565281
  misc_feature: The sequence encodes the protein given in SEQ ID NO. 162
atggaggaggatagagagaatgcaaagagagtagtgtttgtaactgtaggaacaacgagtttcgatgctcttgtgaaagcagtggttagtcaaaatgttaaagacgaactgcagaagagaggatttactcatcttcttattcaaatgggtcgaggaatctttttcccaactaaggttcttcttaatcatcttctccactcacacttctttacttgattgagatttgattatgaaaattggtgtacacacacaagagatgttgttctactcttctcttggtgtacacacacaagagatgcttctcatttgtgttttttttttttccattactgatctcagtgtgatggagcggatggatcattagttgtggattacttcacattttcctcaagtatcgctgattatattcgatctgcatctcttgttattagtcacgctggttagttattgcaatagttgagcacttttacatttaatagaatcaaaaccagagacacattttcgaaatgctaggatataatgttgttgactctcactgatgtaggatctggaagtatatttgagacactgaaactagggaaaccattgattgtggtagtgaacgaagatctgatggacaatcatcaatgtgaattagctgaagcacttgaagagaggaagcacttgtactacactcgtcctcactcccttcatcaaaccttgacgaaaatggagttggggtctctggttcagtatactccaggtgatggaactcctgttgctcgcattatcgacaggttccttggattccctgatgattaa

SEQ ID NO: 162 - protein, 176 aa, Arabidopsis thaliana
  misc_feature: Ceres CDNA ID no. 12706677
  misc_feature: LOCUS ID no. At4g16710
  misc_feature: Ceres SEED LINE ME11822
  misc_feature: Ceres ANNOT ID no. 565281
  misc_feature (11)..(170): Pfam Name. Glyco_tran_28_C Pfam Description. Glycosyltransferase family 28 C-terminal domain
MEEDRENAKRVVFVTVGTTSFDALVKAVVSQNVKDELQKRGFTHLLIQMGRGIFFPTKCDGADGSLVVDYFTFSSSIADYIRSASLVISHAGSGSIFETLKLGKPLIVVVNEDLMDNHQCELAEALEERKHLYYTRPHSLHQTLTKMELGSLVQYTPGDGTPVARIIDRFLGFPDD

SEQ ID NO: 163 - protein, 176 aa, Brassica napus
  misc_feature: Ceres CLONE ID no. 952316
  misc_feature (11)..(170): Pfam Name. Glyco_tran_28_C Pfam Description. Glycosyltransferase family 28 C-terminal domain
  misc_feature: The sequence is a funtional homolog of Ceres ANNOT ID no. 565281 at SEQ ID NO. 162 with e-value of 3.70E-78 and BLAST sequence identity of 87.5
  misc_feature: Xaa can be any naturally occurring amino acid
MEDGENDGKRLVFVTVGTTSFDALVKAVVSENVKEELHKRGYTHLLIQMGRGIYSPPKCDGADGSLAVDYFTFSSSIADYIRSASLVISHAGSGSIFETLKLGKPLIVVVNEDLMDNHQCELAEELEERKHLYCARPHTLHQTLTKMELEXLVRYTPGDGTPVARIIDRFLGFPDD

SEQ ID NO: 164 - protein, 177 aa, Glycine max
  misc_feature: Ceres CLONE ID no. 649261
  misc_feature (13)..(171): Pfam Name. Glyco_tran_28_C Pfam Description. Glycosyltransferase family 28 C-terminal domain
  misc_feature: The sequence is a funtional homolog of Ceres ANNOT ID no. 565281 at SEQ ID NO. 162 with e-value of 3.30E-61 and BLAST sequence identity of 72.4
MGNDEGNDKKKRVVFVTVGTTCFDALVRAVDSNNVKQALFAKGYTHLLIQMGRGSYLPTKSEGDGSLAVDYFTFSSSIADHLRSASLVISHAGSGSIFETLQLGKPLIVVVNEDLMDNHQSELAEELADRKHLYCASPQTLHQTIANMDLSSLFPYSPGDATPVAKHINNLLGFPDD

SEQ ID NO: 165 - DNA, 540 bp, Populus balsamifera subsp. trichocarpa
  misc_feature: Ceres ANNOT ID no. 1469350
  misc_feature: The sequence is a funtional homolog of Ceres ANNOT ID no. 565281 at SEQ ID NO. 162 with e-value of 1.19E-58 and BLAST sequence identity of 69.6
atgggagattccggggatagtgtgaagcaagagaagaaagtggtatttgtaactgtaggaactacattgtttgatgctctagtgagaacagtggatactaaggaagtcaaacaagagttattaagaaaagggtataccgaccttgttattcaaatgggtcgaggatcctacactcctactaagtgtgatggaggacatggatctctggctgttgattacttcactttttctccaagcattgcagaccatctgagatcagcatctcttgtcatcagccatgcagggtctgggagcgtatttgaaactctgcagcttggtaaacctctaattgtagtggtaaatgaagatttgatggacaatcatcaaagtgaacttgcagaagaactagcagagaggaagcatttatattgtgctcatcctcaaacgcttcatcagacaatatctgatatgaatgtggagtccctccttccgtacccatcaggtgatgccacaccgcttgccaagcttatgaacacgtttcttggtttcccagacgactga

SEQ ID NO: 166 - protein, 179 aa, Populus balsamifera subsp. trichocarpa
  misc_feature: Ceres ANNOT ID no. 1469350
  misc_feature (14)..(173): Pfam Name. Glyco_tran_28_C Pfam Description. Glycosyltransferase family 28 C-terminal domain
  misc_feature: The sequence is a funtional homolog of Ceres ANNOT ID no. 565281 at SEQ ID NO. 162 with e-value of 1.19E-58 and BLAST sequence identity of 69.6
MGDSGDSVKQEKKVVFVTVGTTLFDALVRTVDTKEVKQELLRKGYTDLVIQMGRGSYTPTKCDGGHGSLAVDYFTFSPSIADHLRSASLVISHAGSGSVFETLQLGKPLIVVVNEDLMDNHQSELAEELAERKHLYCAHPQTLHQTISDMNVESLLPYPSGDATPLAKLMNTFLGFPDD

SEQ ID NO: 167 - DNA, 540 bp, Populus balsamifera subsp. trichocarpa
  misc_feature: Ceres ANNOT ID no. 1488942
  misc_feature: The sequence is a funtional homolog of Ceres ANNOT ID no. 565281 at SEQ ID NO. 162 with e-value of 6.19E-60 and BLAST sequence identity of 68.75
atgggagatattgaggagagtgtgaagcaagagaagaaagtggtatttgtaactgtaggaacaacattgtttgatgctcttgtgagaactgtggatactaaggaagttaaacaagagttattaagaaacggatatacccacctcattattcaaatgggtcgaggatcttacactcctgccaagagtgaaggaaaagatggatctctggctgttgattacttcactttttcaccaagcattgcagaccatctgagatcagcatctcttgtcatcagccatgcagggtcagggagcatatttgaaactttgcagcttggtaaacctctaattgttgtggttaatgaagatttgatggacaatcatcaaagtgaacttgcagaagaactagcagagaggaagcatttatactgtgctcatcctcaaacgcttcatcagacaatatctgatatgaatattgagtccctccttccatacccgccaggtgatgccgcagcagtcgccaagctgataaacaggtttctaggtttcccagatgattga

SEQ ID NO: 168 - protein, 179 aa, Populus balsamifera subsp. trichocarpa
  misc_feature: Ceres ANNOT ID no. 1488942
  misc_feature (14)..(173): Pfam Name. Glyco_tran_28_C Pfam Description. Glycosyltransferase family 28 C-terminal domain
  misc_feature: The sequence is a funtional homolog of Ceres ANNOT ID no. 565281 at SEQ ID NO. 162 with e-value of 6.19E-60 and BLAST sequence identity of 68.75
MGDIEESVKQEKKVVFVTVGTTLFDALVRTVDTKEVKQELLRNGYTHLIIQMGRGSYTPAKSEGKDGSLAVDYFTFSPSIADHLRSASLVISHAGSGSIFETLQLGKPLIVVVNEDLMDNHQSELAEELAERKHLYCAHPQTLHQTISDMNIESLLPYPPGDAAAVAKLINRFLGFPDD

SEQ ID NO: 169 - protein, 172 aa, Zea mays
  misc_feature: Ceres CLONE ID no. 234461
  misc_feature (8)..(166): Pfam Name. Glyco_tran_28_C Pfam Description. Glycosyltransferase family 28 C-terminal domain
  misc_feature: The sequence is a funtional homolog of Ceres ANNOT ID no. 565281 at SEQ ID NO. 162 with e-value of 2.10E-52 and BLAST sequence identity of 67.6
MADREHRTVFVTVGTTCFDALVMAVDSPEVKKALLQKGYSNLLIQMGRGTYVPLKVSGDATLQVDHFTFSPSIADNMRTASLVISHAGSGSIFETLRLGKPLIVVVNEDLMDNHQSELAEELAERKHLFCARPQTLGETIRAMDLETLVPYEPGDAKPVVTLINRFLGFPVD

SEQ ID NO: 170 - protein, 172 aa, Zea mays
  misc_feature: Ceres CLONE ID no. 217678
  misc_feature (8)..(166): Pfam Name. Glyco_tran_28_C Pfam Description. Glycosyltransferase family 28 C-terminal domain
  misc_feature: The sequence is a funtional homolog of Ceres ANNOT ID no. 565281 at SEQ ID NO. 162 with e-value of 5.49E-52 and BLAST sequence identity of 66.6
MAEREHRTVFVTVGTTCFDALVMAVDSPEVKKALLQKGYSNLLIQMGRGTYVPSKVSGDATLQVDHFTFSPSIADNMRTASLVISHAGSGSIFETLRLGKPLIVVVNEDLMDNHQSELAEELAERKHLFCARPQTLGETIRAMDLETLVPYEPGDAKPVVALINRFLGFPVA

SEQ ID NO: 171 - protein, 172 aa, Triticum aestivum
  misc_feature: Ceres CLONE ID no. 1327188
  misc_feature (8)..(166): Pfam Name. Glyco_tran_28_C Pfam Description. Glycosyltransferase family 28 C-terminal domain
  misc_feature: The sequence is a funtional homolog of Ceres ANNOT ID no. 565281 at SEQ ID NO. 162 with e-value of 6.29E-51 and BLAST sequence identity of 65.2
MGDRERRVVFVTVGTTCFDALVKVVDSEELKQALLQKGYTDLLIQMGRGTYKPSKASGNSSLQVEHFTFSPSIADNIREASLVISHAGSGSIFETLRLGKPLIVVVNEDLMDNHQSELAEELAERNHLFCAHPQTLRENVEAMDLNALQPYVPGEAKPVVALINRFLGFPVD

SEQ ID NO: 172 - DNA, 875 bp, Arabidopsis thaliana
  misc_feature: Ceres CDNA ID no. 12669189
  misc_feature: Ceres SEED LINE ME11833
  misc_feature (1)..(875): Predicted Sequence
  misc_feature: Ceres ANNOT ID no. 568986
  misc_feature: The sequence encodes the protein given in SEQ ID NO. 173
atggctgaagatgaagatcattattgtgaacaacacctgattggtccattggatcacagttcgtcaatggttgtcatcagagaatcgccaattttcgccaaggacgatggcgttgtgttcccgccgatctaccatgagaatctccatgtcgcttcttccgtctatggagtcgatagatacctcgaatctccgtcggaatcctcgtctccgtcatcttcgtcgagacgctctggttcatcttcttctttttcgttgtttccttctgattcagatggacaaacgtcactgactgcgtttgaatttgaccggaaggctccgtcggaaactgaagaaaaatctctgccgttgttgttaagcggtgaatctccaccgtccgattcgggggaacagtcgccatttgaacagatatctccgcgattaccttctgaacaaggcggcaagtctccaccatgcgattcagatgggaaattactggggaaaccattgaatcgtgaagttgatgtcctccacgattggtgggagcctcttcttgtacgtttatactccaagttgaagaatttgttgacctggttctcaaagactatccgatcattttatccagttcttgccattgcgatttggtggtggatgcgtgtacgagctcctcggaaacgcgttaaaggagaaaacatggatcatcttcgagatgtgatcaaagagagagacgaggtatgtttttgtgcatacaaagtgtttgatgaaatgcctaagagacgtgacattactattgttttctgattttgaaacagaggatagttcagcttttgcatcaacttgctcaaatgaatgagttactgttaaagcaccacaaggacattgtatcaagaagaagatga

SEQ ID NO: 173 - protein, 264 aa, Arabidopsis thaliana
  misc_feature: Ceres CDNA ID no. 12669189
  misc_feature: LOCUS ID no. At5g07730
  misc_feature: Ceres SEED LINE ME11833
  misc_feature (1)..(264): Predicted Sequence
  misc_feature: Ceres ANNOT ID no. 568986
  misc_feature: The sequence is a funtional homolog of Ceres SEED LINE ME11833 at SEQ ID NO. 367
MAEDEDHYCEQHLIGPLDHSSSMVVIRESPIFAKDDGVVFPPIYHENLHVASSVYGVDRYLESPSESSSPSSSSRRSGSSSSFSLFPSDSDGQTSLTAFEFDRKAPSETEEKSLPLLLSGESPPSDSGEQSPFEQISPRLPSEQGGKSPPCDSDGKLLGKPLNREVDVLHDWWEPLLVRLYSKLKNLLTWFSKTIRSFYPVLAIAIWWWMRVRAPRKRVKGENMDHLRDVIKERDERIVQLLHQLAQMNELLLKHHKDIVSRRR

SEQ ID NO: 174 - DNA, 429 bp, Arabidopsis thaliana
  misc_feature: Ceres ANNOT ID no. 542494
  misc_feature: Ceres SEED LINE ME09515
  misc_feature (1)..(429): cDNA sequence
  misc_feature: The sequence encodes the protein given in SEQ ID NO. 175
atgggagattcggagtcatttgttgggaaaaattggaatggattgaaggatttctggagtgataggttatcatttttcgaaaattacaccagattcaccaaacgcgacgcgcctcttccttcttggtcttcctccgacgtcgaggaattcattgcctccgatcccgttcatggacccaccctgaaaacggctagggaagctgtgacgtttggtgttaccggagctgcacttggagctgtctctactgctgcttttgcctggaaatactccaggagtccacatggtgctgcattgtccttcttaggaggaggtgtttttggttggacctttgggcaagaggtcgccaaccacacactgcaactctacaagttggacacaatggcagcccaagttaagttcatggaatggtgggaacgtaagtctcaataa

SEQ ID NO: 175 - protein, 142 aa, Arabidopsis thaliana
  misc_feature: Ceres ANNOT ID no. 542494
  misc_feature: Ceres SEED LINE ME09515
MGDSESFVGKNWNGLKDFWSDRLSFFENYTRFTKRDAPLPSWSSSDVEEFIASDPVHGPTLKTAREAVTFGVTGAALGAVSTAAFAWKYSRSPHGAALSFLGGGVFGWTFGQEVANHTLQLYKLDTMAAQVKFMEWWERKSQ

SEQ ID NO: 176 - protein, 138 aa, Zea mays
  misc_feature: Ceres CLONE ID no. 1369396
  misc_feature: The sequence is a funtional homolog of Ceres ANNOT ID no. 542494 at SEQ ID NO. 175 with e-value of 1.19E-63 and BLAST sequence identity of 89.1
MGDSRSFADGFKGFWEERLSFLENYTRFTKRDAPLPSWSSSDVEEFIASDPVHGPTLKTAREAATYGVAGAALGALSTAAFAWKYSRSPHGAALSFLGGGVFGWTFGQEVANHSLQLYKLDTMAAQIKFMEWWERKTQ

SEQ ID NO: 177 - protein, 124 aa, Brassica napus
  misc_feature: Ceres CLONE ID no. 1102549
  misc_feature: The sequence is a funtional homolog of Ceres ANNOT ID no. 542494 at SEQ ID NO. 175 with e-value of 1.70E-53 and BLAST sequence identity of 85.4
MGDSRSLLDGFKGFWEERLSFLDNYTRFTKRDAPLPSWSSSDVDEFIASDPVNGPTLKTAREAAAFGATGAALGAVSTAAFAWKYSKSPHGAALSFLGGGLFGWTFGQEVANHTMQLYKLDTMA

SEQ ID NO: 178 - DNA, 450 bp, Populus balsamifera subsp. trichocarpa
  misc_feature: Ceres ANNOT ID no. 1515577
  misc_feature: The sequence is a funtional homolog of Ceres ANNOT ID no. 542494 at SEQ ID NO. 175 with e-value of 1.70E-53 and BLAST sequence identity of 72.7
atgggagaaccatcagacctacaacatcagcaatcatttttcaagaaacactgggaagggtttacagaattttggggagatagattttcgtttgttgaaaactatgcaagattcctcaggcgtgataaaccaatcccttcttggtctgattctgatgttcaagaattcattgcttcagatcatattcatggccccactctgaggactgctagggaagcagtaaactttggacttacaggaagtgtaattggagcagtatcaacagcaggtgttgcctggaaatattcaaggagcttgcatggtgctgggctgtcctttctagctggaggtgtttttgggtggacatttggacatgaagttggaaaccactggctacaactctacaggttggataccatggcagcacaggttaagttcattgagtggtgggagaaaaaatgtggagagtag

SEQ ID NO: 179 - protein, 149 aa, Populus balsamifera subsp. trichocarpa
  misc_feature: Ceres ANNOT ID no. 1515577
  misc_feature: The sequence is a funtional homolog of Ceres ANNOT ID no. 542494 at SEQ ID NO. 175 with e-value of 1.70E-53 and BLAST sequence identity of 72.7
MGEPSDLQHQQSFFKKHWEGFTEFWGDRFSFVENYARFLRRDKPIPSWSDSDVQEFIASDHIHGPTLRTAREAVNFGLTGSVIGAVSTAGVAWKYSRSLHGAGLSFLAGGVFGWTFGHEVGNHWLQLYRLDTMAAQVKFIEWWEKKCGE

SEQ ID NO: 180 - protein, 141 aa, Glycine max
  misc_feature: Ceres CLONE ID no. 516401
  misc_feature: The sequence is a funtional homolog of Ceres ANNOT ID no. 542494 at SEQ ID NO. 175 with e-value of 6.10E-51 and BLAST sequence identity of 70.0
MADNTQSYWEGYKAFWSERFSFLSNYSRFINRDKPIPSWSSSDVEEFIASDPVHGPVLKSAREAVQFGLTGSALGALFTAGYAWKYSKSLHGAGLTFLAGGIFGWTFGHEIANHTLQLYRVDTLAAEAKFLDWWNKKTGGY

SEQ ID NO: 181 - protein, 141 aa, Triticum aestivum
  misc_feature: Ceres CLONE ID no. 618542
  misc_feature: The sequence is a funtional homolog of Ceres ANNOT ID no. 542494 at SEQ ID NO. 175 with e-value of 8.59E-29 and BLAST sequence identity of 45.1
MGIGEHFEGVKQHWARNFAFLDYFKKVYGRDQPLPKWSDADVEEFIASDPVYGPQLKALRESRKFALGGALAGAAHLGGVAFKYSKSPHGVVLATGFGALTGAVLGSEVAEHWYELYKMDKQGANLRFIYWWEDKVSGQKN

SEQ ID NO: 182 - protein, 142 aa, Oryza sativa subsp. japonica
  misc_feature: Public GI no. 50940451
  misc_feature: The sequence is a funtional homolog of Ceres ANNOT ID no. 542494 at SEQ ID NO. 175 with e-value of 1.39E-26 and BLAST sequence identity of 44.8
MGIHEHVEGIKAHWAKNFSFLDYFKKVYGRDKPLPKWTDADVDEFIASDPVYGPQLKAMRESRKFALGGALVGGAHLGGIALKYSKAPHGVVLATGFGAICGAVVGSEVAEHWYQLYKTDKQGANLRFIYWWEDKVAGNQKS

SEQ ID NO: 183 - protein, 141 aa, Zea mays
  misc_feature: Ceres CLONE ID no. 305154
  misc_feature: The sequence is a funtional homolog of Ceres ANNOT ID no. 542494 at SEQ ID NO. 175 with e-value of 9.79E-28 and BLAST sequence identity of 42.8
MGIGEHFEGVKQHWASNFAFLDYFKKVYGRAEPLPKWSDADVDEFIASDPVYGPQLKALRESRKFALAGALVGAAHLGGVALKYSKAPHGVLLATGFGAITGAVLGSEVADHWYQLYEMDKQGANLRFIYWWEDKVSGQKS

SEQ ID NO: 184 - DNA, 771 bp, Arabidopsis thaliana
  misc_feature: Ceres ANNOT ID no. 549258
  misc_feature: Ceres SEED LINE ME11837
  misc_feature: The sequence encodes the protein given in SEQ ID NO. 185
atgggtcacttgccacagagcctctactccgccgctggaccaaagtttccatatcctggaagctccggtctaggagtagatcaacggaagctgacgtggagccgcttcccggtgttcctacggtgcgcgtcgacggagtcgttaacgagtttgactcagaataatgcggcggagatagagttgaagtatctggtgagtcaacacgggtgggacgtgaggagattgaatagagacgacgaggatgagatcaggagagtgtctcttgttcaagccgaagctttccacatccctcttgctctttttgatgattttttcttcatgttttttcaggcagaggttctatcagcacttctttacaaactaaagaattcaccacctgacagatatgcatgtctcgtggcggagcaaacaagtgaaactgaaactttgtcgagctcaagtgttgtcggagtagttgatgtaacagctcaaactgaaagttcagtacttcgctattttccgggcgtcgaagaatatctatacgtctcgggtttagctgtctcaaaatctcaaaggagaaagaagatggcaagtacattgttaaaggcatgtgatgttttgtgttacttgtggggtttcaagcttcttgctctaagagcttatgaagacgatgcagctgctagaaatctttactcgaatgccggctacagtgtggtcgagactgacccgttgtggacctctacttggataggcagaaaacgtcgcgttcttatgagtaaacgcttttcttag

SEQ ID NO: 185 - protein, 256 aa, Arabidopsis thaliana
  misc_feature: Ceres ANNOT ID no. 549258
  misc_feature (140)..(230): Pfam Name. Acetyltransf_1 Pfam Description. Acetyltransferase (GNAT) family
  misc_feature: Ceres SEED LINE ME11837
MGHLPQSLYSAAGPKFPYPGSSGLGVDQRKLTWSRFPVFLRCASTESLTSLTQNNAAEIELKYLVSQHGWDVRRLNRDDEDEIRRVSLVQAEAFHIPLALFDDFFFMFFQAEVLSALLYKLKNSPPDRYACLVAEQTSETETLSSSSVVGVVDVTAQTESSVLRYFPGVEEYLYVSGLAVSKSQRRKKMASTLLKACDVLCYLWGFKLLALRAYEDDAAARNLYSNAGYSVVETDPLWTSTWIGRKRRVLMSKRFS

SEQ ID NO: 186 - protein, 249 aa, Brassica napus
  misc_feature: Ceres CLONE ID no. 945519
  misc_feature (141)..(223): Pfam Name. Acetyltransf_1 Pfam Description. Acetyltransferase (GNAT) family
  misc_feature: The sequence is a funtional homolog of Ceres ANNOT ID no. 549258 at SEQ ID NO. 185 with e-value of 8.39E-109 and BLAST sequence identity of 87.4
  misc_feature: Xaa can be any naturally occurring amino acid
  misc_feature: Xaa can be any naturally occurring amino acid
MAHLPQSLYSAARPEFPYPGKSVQPKWSRFPVSVRCASTESLTSLTQNAVETELKYMVSQHGWGVRRLRRDDEEEIRRVSSVQAEAFHIPLALFNDFFFLFFQAEVLSGLLYKLKNSPPDRYACLVAEQTSETDTSSSSSVVGVVDITVQTENSVLRHFPGEEEYLYVSGLAVSKAQRRKKMASTLLKACDVICYLWGFKLLALRAYEDDAAARNLYSNAGYSVVESDXPWTSTWIGRKRRVLMTKRIX

SEQ ID NO: 187 - protein, 288 aa, Oryza sativa subsp. japonica
  misc_feature: Public GI no. 50935585
  misc_feature (170)..(254): Pfam Name. Acetyltransf_1 Pfam Description. Acetyltransferase (GNAT) family
  misc_feature: The sequence is a funtional homolog of Ceres ANNOT ID no. 549258 at SEQ ID NO. 185 with e-value of 1.70E-55 and BLAST sequence identity of 60.8
MAVLLRPSTLLPSSQSTTTSRLRFPVATPLPRCRHGGAGKKSRLLVARRRGRRDRVACLPTKEEEEEEVGVAGDGGEEDGDEDGYLAREGEWGVRRMGRVGEEMRRVALVQAEAFHIPVALFNDFFFDFFKAEVLSALIYRVRNSPPDRYACLVAEEVDATSQISEAPFEKIVGVVDCTVQNEADILKNLQGVDEYLYVSGIAVLPSFRRRKVGTALLKACEALALQWRHRFMALRAYKDDDGARGLYSKAGYRVVAKDPGWVTWVGRRRRVLMIKELPIHEHHLEQQ

SEQ ID NO: 188 - protein, 294 aa, Oryza sativa subsp. japonica
  misc_feature: Public GI no. 51963354
  misc_feature (176)..(260): Pfam Name. Acetyltransf_1 Pfam Description. Acetyltransferase (GNAT) family
  misc_feature: The sequence is a funtional homolog of Ceres ANNOT ID no. 549258 at SEQ ID NO. 185 with e-value of 1.70E-55 and BLAST sequence identity of 60.8
MSPAATMAVLLRPSTLLPSSQSTTTSRLRFPVATPLPRCRHGGAGKKSRLLVARRRGRRDRVACLPTKEEEEEEVGVAGDGGEEDGDEDGYLAREGEWGVRRMGRVGEEMRRVALVQAEAFHIPVALFNDFFFDFFKAEVLSALIYRVRNSPPDRYACLVAEEVDATSQISEAPFEKIVGVVDCTVQNEADILKNLQGVDEYLYVSGIAVLPSFRRRKVGTALLKACEALALQWRHRFMALRAYKDDDGARGLYSKAGYRVVAKDPGWVTWVGRRRRVLMIKELPIHEHHLEQQ

SEQ ID NO: 189 - DNA, 750 bp, Arabidopsis thaliana
  misc_feature: Ceres ANNOT ID no. 564261
  misc_feature: Ceres SEED LINE ME11827
  misc_feature: The sequence encodes the protein given in SEQ ID NO. 190
atggcttatgcaacttctacctatgcacgaacctcatgcattatcctacccaaaatccaaaacggcgcgcatttcacggatgacacgaaagcatttagaaggataacagcaagaagagtgacgcgtatatacgcgtcacaaggcccgactaaaccgtcaaaaccatctccaggagtagacacaagaatccactgggaaagcccggacgaaggctggatcggaggaagatccgacccggccaaatcggttgatgaggacaaaaccaatctccttagtgacgaaaaatttgcagaactaatcaaagactcttttgattctcattaccaattcttaggtgtttcaacggatgctgatctagaagagataaaatctgcgtaccggagattatctaaagagtatcatccagatacaacttcactaccacttaaaacagcttcagaaaagttcatgaaattaagagaagtgtacaatgttttgagcgatgaagagactcggaggttttatgactggacactggctcaagaagttgcgagtcgtcaagctgagaaaatgagaatgaagctagaggatccgaaagagcaagattttaggggctatgaatcaatacctgatatggttgaccggttaggtggaagaaacatggagcttagtgatcaagcaatgactgctctcacgttcgatattttgatcgtattattcgctgtttgttgtatagcttttgtgattgttttcaaagatccttcttactag

SEQ ID NO: 190 - protein, 249 aa, Arabidopsis thaliana
  misc_feature: Ceres ANNOT ID no. 564261
  misc_feature (106)..(172): Pfam Name. DnaJ Pfam Description. DnaJ domain
  misc_feature: Ceres SEED LINE ME11827
MAYATSTYARTSCIILPKIQNGAHFTDDTKAFRRITARRVTRIYASQGPTKPSKPSPGVDTRIHWESPDEGWIGGRSDPAKSVDEDKTNLLSDEKFAELIKDSFDSHYQFLGVSTDADLEEIKSAYRRLSKEYHPDTTSLPLKTASEKFMKLREVYNVLSDEETRRFYDWTLAQEVASRQAEKMRMKLEDPKEQDFRGYESIPDMVDRLGGRNMELSDQAMTALTFDILIVLFAVCCIAFVIVFKDPSY

SEQ ID NO: 191 - protein, 243 aa, Brassica napus
  misc_feature: Ceres CLONE ID no. 947761
  misc_feature (100)..(166): Pfam Name. DnaJ Pfam Description. DnaJ domain
  misc_feature: The sequence is a funtional homolog of Ceres ANNOT ID no. 564261 at SEQ ID NO. 190 with e-value of 1.90E-104 and BLAST sequence identity of 83.1
MASPASTYARTTCICFPKIQNSMQFIDRMGAFRNITRRRVRLIHASQGPTKPLPGVDTRIHWENPDDGWIGGGSDPIKPDDTNLFSDDKFAELIKDSFDSHYQFLGVSTDADLEDIKSAYRRLSKEYHPDTTSLPLKTASDKFMKLKEVYDVLSDEESRRFYDWTLAQEVASRQAEKMRMKLEDPKEQEFRNYESIPDMVDRLGGRNMELSDQAMTALTFDVLIIVFAVCCIVYVVVFKDPYY

SEQ ID NO: 192 - protein, 234 aa, Glycine max
  misc_feature: Ceres CLONE ID no. 680759
  misc_feature (90)..(156): Pfam Name. DnaJ Pfam Description. DnaJ domain
  misc_feature: The sequence is a funtional homolog of Ceres ANNOT ID no. 564261 at SEQ ID NO. 190 with e-value of 3.10E-72 and BLAST sequence identity of 64.7
  misc_feature: Xaa can be any naturally occurring amino acid
MAFAAAPLIQVVLYGNPKFLFLRTTARCTVHASRRPPPPGPGVDTRIHWENEDEGWIGATNTKHQQTHKPNNNMLQADDFPDFLTASLGSHYEFLGVSPDADVEEIKVAYRKLSKEYHPDTTSLPLKTASEKFMKLREVYNVLSNEESRKFYDWTLAQEAASRHAEKMKMKLEDPRQQQLKNWEPVPDMVDRLGGRNMKLSDQAVSAITIDLFIIVFALCCIIYVIFFKEPYYX

SEQ ID NO: 193 - protein, 251 aa, Oryza sativa subsp. japonica
  misc_feature: Public GI no. 77549263
  misc_feature (109)..(175): Pfam Name. DnaJ Pfam Description. DnaJ domain
  misc_feature: The sequence is a funtional homolog of Ceres ANNOT ID no. 564261 at SEQ ID NO. 190 with e-value of 8.49E-61 and BLAST sequence identity of 64.3
MAASTASAPFTPLLHRRRASVHGRRGSGRAFVAVVVAAAAGGAPETEPSPATAAGAAAQGKKKTVDTRIHWSDPDEGWVGGNAKKDGGGRKKEPLGGRFADLINNPSESHYQFLGVEPKADIEEIKAAYRRLSKEYHPDTTSLPLREASERFIRLREAYNVLSREESRRFYDWTLAQEAESRRLQQLRSRLEDPYQQDLDSYQSVPDMVDRLGGRNMDLSDQAMTALTIDIGIIIFCVFCLIYAVFFKEQY

SEQ ID NO: 194 - DNA, 771 bp, Populus balsamifera subsp. trichocarpa
  misc_feature: Ceres ANNOT ID no. 1486789
  misc_feature: The sequence is a funtional homolog of Ceres ANNOT ID no. 564261 at SEQ ID NO. 190 with e-value of 6.00E-76 and BLAST sequence identity of 62.7
atggcttccacaactgccactcaagctccgttttctctctttcttaggacccaaaacggcagtggccaccgtaggaaaaaacatctgtcgataagaaaagccccatcaggaagaacaggcaacagagggagagcttttggtgtttatgcagaacaaggaagcccagagaagcctcaaagagcaccaccaggggttgatacaagaattcattgggacaacgaagatgaagggtgggttggaggaagtagtactagttcagagcagacaaagcaagcagaagatgagcagaaagatatgttgggaaagaggtttgctgatttgctcaatgattcttctgattctcattaccagttcttaggcgtatcagcagatgctgatatggaggagattaaaaccgcatacaggaggctatcaaaggagtaccatccagacacaacttcacttccactgaaatcagcttcagaaaagttcatgagactaagagaagtttatgatatcttgagcaatgatgagaaacgcaaattttatgattggacactagctcaagaggctgcaagccggcaagcagagcaaatgagaatgagattggaagatccttatgaacaagaaataaacagatatgaatctgtaccggacatggttgatcgtcttggtggaagaaacatgggtctaagtgatcaagcaatgtcagctcttacgtttgatatttttatcatactcttctcaattggttgcctcatttttgttctcttcttcaaagaaccatattag

SEQ ID NO: 195 - protein, 256 aa, Populus balsamifera subsp. trichocarpa
  misc_feature: Ceres ANNOT ID no. 1486789
  misc_feature (114)..(180): Pfam Name. DnaJ Pfam Description. DnaJ domain
  misc_feature: The sequence is a funtional homolog of Ceres ANNOT ID no. 564261 at SEQ ID NO. 190 with e-value of 6.00E-76 and BLAST sequence identity of 62.7
MASTTATQAPFSLFLRTQNGSGHRRKKHLSIRKAPSGRTGNRGRAFGVYAEQGSPEKPQRAPPGVDTRIHWDNEDEGWVGGSSTSSEQTKQAEDEQKDMLGKRFADLLNDSSDSHYQFLGVSADADMEEIKTAYRRLSKEYHPDTTSLPLKSASEKFMRLREVYDILSNDEKRKFYDWTLAQEAASRQAEQMRMRLEDPYEQEINRYESVPDMVDRLGGRNMGLSDQAMSALTFDIFIILFSIGCLIFVLFFKEPY

SEQ ID NO: 196 - protein, 241 aa, Zea mays
  misc_feature: Ceres CLONE ID no. 230678
  misc_feature (99)..(165): Pfam Name. DnaJ Pfam Description. DnaJ domain
  misc_feature: The sequence is a funtional homolog of Ceres ANNOT ID no. 564261 at SEQ ID NO. 190 with e-value of 1.90E-63 and BLAST sequence identity of 61.3
MAASTASRIFTPFLHRHQRRTKAVVVAAASPPDAEPTPATADGAGPGKKKTVDTRIHWSNPDEGWVGGKAKKEGDGRGSSKNEPLGGRFADLINNAAESHYQFLGIAPEADIEEIKTAYRRLSKEYHPDTTTLPLKVASQKFIRLREVYNVLSKEETRRFYDWTLAQEAESRRLQQLRSRLEDPYEQDIINYKPVPDMVDRLGGKNMKLSDQAMTALTIDIVIIIISICCIIYAVFFKEQY

SEQ ID NO: 197 - DNA, 738 bp, Arabidopsis thaliana
  misc_feature: Ceres ANNOT ID no. 565548
  misc_feature: Ceres SEED LINE ME11836
  misc_feature: The sequence encodes the protein given in SEQ ID NO. 198
atggacttggctcttcattgtcattgtgcttacccgttgatcaaactaggattcatgagagctaaatcagccaatcatcttcatgttcgagatactcattcactgccgtttgcgttgcgctttgagcagagtctttcgagaacaacgattaatggagatagaagtatttggtttcaagagaaaggtggttcttcttatacttcaatgggaagatccaagaaaggatgtgtttgttgcaagaaaccgtctgatagacgaacgtcaaacccaagtaaatcgaaccaagaggagatcatttcgctcttgaaacggattcaatcttcgatctctaaaggagagtctcgaggagtcgaggaagagaagaacagcgatgagtcttctaaggaaaagccgctgaccaaagctattcttgacgttcttgagaaatcaagaaaaaaaactgagggagatactagtgtgaaggagaagccaccaaagagacaagtagagcttcctcgaccaccgtctagttttgtcaagagaactcctttatcttcttctgcctcaggtccaagaggtaagctcccagtatcaaacagcgataaagctttaggaaaattgacaaagaaggaagagaaagcttcactgatagaaactatgaaacttgcagagctcaaagaagttgcaaagaacagaggaatcaaaggatactcaaagttgaggaagagtgaactattggagctgataagatcgtcctga

SEQ ID NO: 198 - protein, 245 aa, Arabidopsis thaliana
  misc_feature: Ceres ANNOT ID no. 565548
  misc_feature (208)..(240): Pfam Name. Rho_N Pfam Description. Rho termination factor, N-terminal domain
  misc_feature: Ceres SEED LINE ME11836
MDLALHCHCAYPLIKLGFMRAKSANHLHVRDTHSLPFALRFEQSLSRTTINGDRSIWFQEKGGSSYTSMGRSKKGCVCCKKPSDRRTSNPSKSNQEEIISLLKRIQSSISKGESRGVEEEKNSDESSKEKPLTKAILDVLEKSRKKTEGDTSVKEKPPKRQVELPRPPSSFVKRTPLSSSASGPRGKLPVSNSDKALGKLTKKEEKASLIETMKLAELKEVAKNRGIKGYSKLRKSELLELIRSS

SEQ ID NO: 199 - protein, 227 aa, Brassica napus
  misc_feature: Ceres CLONE ID no. 976147
  misc_feature (191)..(225): Pfam Name. Rho_N Pfam Description. Rho termination factor, N-terminal domain
  misc_feature: The sequence is a funtional homolog of Ceres ANNOT ID no. 565548 at SEQ ID NO. 198 with e-value of 4.40E-57 and BLAST sequence identity of 66.3
  misc_feature: Xaa can be any naturally occurring amino acid
MDLALHFPSLIKQEFTRANHLHVRDTLSTSFGQSFSRTAFDGDRRSWHGEKAWSSSLTWRSKKGYVVCCKNPSDDVQSLDPSKAKQEEIISLFRRIQASISKGEESQGTDEKKGLASSGNESLSKAILDVLEKPRDKTDGDAGVRIEPPKRQVARXPSSFAKRSPTRPSAPGQRGKLPITKSSMEETEKEEIETMKLAELKEVAKNKGLKGYSKLKKSEILELLRSS

SEQ ID NO: 200 - DNA, 789 bp, Arabidopsis thaliana
  misc_feature: Ceres ANNOT ID no. 841273
  misc_feature: Ceres SEED LINE ME11271
  misc_feature: The sequence encodes the protein given in SEQ ID NO. 201
atgcgttgtgtgaatcgcgttgattgttcttggtcacggccaagcgaagcttaccgtatcttaccctccggtggtcacctttcatctggattccatcaatgtcctttatcgtctctatctttccgttcctctttcgtgtgttgctcctcctccacatctggaccgtccgattcaaatcccgaatcatcttcaaatcgctcttacagccgtagatggcagaatcctcttccccggcgtcaacatcccgatcaaataccgtcttctcagattgctcgtgattggatcgattcagatacaactccagtttctcaagagagattcactgtagtgtcgtacaacatattgggagatggaaattcatcatatcacagagagttgtactccaatgtgtctgttccttacctcaagtggggctaccgcaaaaggttgatatgcgaagaactcattcgtctcaatccagacataatctctatgcaggaagtagataaatattttgatctattcagtatgatggagaaagctggatatgctggctcctataagaaggactacaaatataagctttgcaatggcagcggcgaactggagataacgtcgatggttgcgcaatgttttggaaggctgacaggtttggagttttggagagggaaaacattgagtttagccagtttggtatgcgggataatgttgcacagcttgctgttcttgagctccggaagtctaataagtcaagaaagatactgctgggtaacattcacgtgctttataatccaaatcaaggagatgtga

SEQ ID NO: 201 - protein, 262 aa, Arabidopsis thaliana
  misc_feature: Ceres ANNOT ID no. 841273
  misc_feature (107)..(162): Pfam Name. Exo_endo_phos Pfam Description. Endonuclease/Exonuclease/phosphatase family
  misc_feature: Ceres SEED LINE ME11271
MRCVNRVDCSWSRPSEAYRILPSGGHLSSGFHQCPLSSLSFRSSFVCCSSSTSGPSDSNPESSSNRSYSRRWQNPLPRRQHPDQIPSSQIARDWIDSDTTPVSQERFTVVSYNILGDGNSSYHRELYSNVSVPYLKWGYRKRLICEELIRLNPDIISMQEVDKYFDLFSMMEKAGYAGSYKKDYKYKLCNGSGELEITSMVAQCFGRLTGLEFWRGKTLSLASLVCGIMLHSLLFLSSGSLISQERYCWVTFTCFIIQIKEM

SEQ ID NO: 202 - DNA, 619 bp, Arabidopsis thaliana
  misc_feature: Ceres CLONE ID no. 2721
  misc_feature: Ceres SEED LINE ME03392
  misc_feature: The sequence encodes the protein given in SEQ ID NO. 203
gaactatcttcttttatcaaaaactatattcacaggctgccgtgtaccttctccatccaaagatggcaactatagctactggtcttaacattgcaacccagcgtgtcttcgtcaccagcgagaatcggccagtttgtctcgccggtccggtccatttgaacaattcgtggaatcttgggtcaagaacaactaaccggatgatgaaacttcagccgattaaagcagcaccggaaggagggatatcggacgtagtggagaaaagcattaaggaagctcaggagacttgtgcgggcgatcctgtgagtggagagtgtatagctgcgtgggacgaggttgaagaacttagcgcagcagctagccatgctagagacaagaagaaggctgatggttcggaccctttggaggaatactgcaaagacaatcctgagaccaacgagtgccgtacttacgacaactgaagcgatcaagatcctgttccggattcatacgtatacgacaaatctttgttccggtccatttggtaatgtcaggttatataaatcatgtctttgaatctgaattagctccaaaaacatttgtaatttgtagttccataaacgaatacaaaagccaaaatttc

SEQ ID NO: 203 - protein, 131 aa, Arabidopsis thaliana
  misc_feature: Ceres CLONE ID no. 2721
  misc_feature (60)..(131): Pfam Name. CP12 Pfam Description. CP12 domain
  misc_feature: Ceres SEED LINE ME03392
MATIATGLNIATQRVFVTSENRPVCLAGPVHLNNSWNLGSRTTNRMMKLQPIKAAPEGGISDVVEKSIKEAQETCAGDPVSGECIAAWDEVEELSAAASHARDKKKADGSDPLEEYCKDNPETNECRTYDN

SEQ ID NO: 204 - protein, 128 aa, Brassica napus
  misc_feature: Ceres CLONE ID no. 871180
  misc_feature (60)..(128): Pfam Name. CP12 Pfam Description. CP12 domain
  misc_feature: The sequence is a funtional homolog of Ceres CLONE ID no. 2721 at SEQ ID NO. 203 with e-value of 6.80E-52 and BLAST sequence identity of 82.8
MATIATSLNIGTQGAVITSESRPVRLAGPVRLNNPWNLGSRTTNRMAAVRPVKATPEGVISDKVEKSIKDAEETCAGDPVSGECVAAWDEVEELSAAASHARDKKKDSDPLEEYCKDNPETSECRTYD

SEQ ID NO: 205 - protein, 119 aa, Glycine max
  misc_feature: Ceres CLONE ID no. 1115650
  misc_feature (60)..(111): Pfam Name. CP12 Pfam Description. CP12 domain
  misc_feature: The sequence is a funtional homolog of Ceres CLONE ID no. 2721 at SEQ ID NO. 203 with e-value of 1.49E-40 and BLAST sequence identity of 80.1
MATIATSLNIGTQGAVITSESRPVRLAGPVRLNNPWNLGSRTTNRMAAVRPVKATPEGVISDKVEKSIKDAEETCAGDPVSGECVAAWDEVEELSAAASHARDKKKDSRPFGGILQRQS

SEQ ID NO: 206 - protein, 124 aa, Panicum virgatum
  misc_feature: Ceres CLONE ID no. 1767185
  misc_feature (54)..(124): Pfam Name. CP12 Pfam Description. CP12 domain
  misc_feature: The sequence is a funtional homolog of Ceres CLONE ID no. 2721 at SEQ ID NO. 203 with e-value of 1.60E-25 and BLAST sequence identity of 79.1
MASTVASLSTPATAFAAADVVPRRKAAEGRVWFPVARHGSFAVRSSGPGTPPGISDKVSESIKKAEETCADEKVSGECAAAWDEVEELSAAASHARDKLKDSSDPLENYCKENPETDECRIYDN

SEQ ID NO: 207 - protein, 124 aa, Spinacia oleracea
  misc_feature: Public GI no. 1617213
  misc_feature (55)..(124): Pfam Name. CP12 Pfam Description. CP12 domain
  misc_feature: The sequence is a funtional homolog of Ceres CLONE ID no. 2721 at SEQ ID NO. 203 with e-value of 1.39E-28 and BLAST sequence identity of 79.0
MASMSLSMTPKILLPNNPTTNFDAPKLANMVTYKLHGGRRSHGLVAVRAAPDNRISENVEKSIKEAQETCSDDPVSGECVAAWDVVEELSAAASHARDKAKDVEPLEEYCKDNPETDECRTYDN

SEQ ID NO: 208 - protein, 126 aa, Triticum aestivum
  misc_feature: Ceres CLONE ID no. 772741
  misc_feature (57)..(126): Pfam Name. CP12 Pfam Description. CP12 domain
  misc_feature: The sequence is a funtional homolog of Ceres CLONE ID no. 2721 at SEQ ID NO. 203 with e-value of 1.50E-24 and BLAST sequence identity of 78.6
MASALTNVSLSTFAPTARGDVLARPQVAAARVTFPTAHRGSGALSCRAGGPATPPGISDKMSDSIKEAQETCSEDAASGECAAAWDEVEELSAAASHARDKLKDSDPLENYCKENPETDECRTYDS

SEQ ID NO: 209 - protein, 124 aa, Panicum virgatum
  misc_feature: Ceres CLONE ID no. 1760834
  misc_feature (54)..(124): Pfam Name. CP12 Pfam Description. CP12 domain
  misc_feature: The sequence is a funtional homolog of Ceres CLONE ID no. 2721 at SEQ ID NO. 203 with e-value of 3.40E-25 and BLAST sequence identity of 77.7
MASTVASLSTPATAFAAADVDPRRKAAEGRVWFPVARRGSFAVRSSGPGTPPGISDKVSESIKKAEETCADEKVSGECAAAWDEVEDLSAAASHARDKLKDSSDPLENYCKENPETDECRIYDN

SEQ ID NO: 210 - protein, 123 aa, Panicum virgatum
  misc_feature: Ceres CLONE ID no. 1762311
  misc_feature (53)..(123): Pfam Name. CP12 Pfam Description. CP12 domain
  misc_feature: The sequence is a funtional homolog of Ceres CLONE ID no. 2721 at SEQ ID NO. 203 with e-value of 4.40E-25 and BLAST sequence identity of 77.7
MASTVASLSTPAAAFAAADVVPRRKIAGRVWFPVARRVGFAVRSSGPGTPPGISDKVSESIKKAEETCADEKVSGECAAAWDEVEELSAAASHARDKLKENSDPLENYCKENPETDECRIYDN

SEQ ID NO: 211 - protein, 107 aa, Brassica napus
  misc_feature: Ceres CLONE ID no. 1080241
  misc_feature (59)..(105): Pfam Name. CP12 Pfam Description. CP12 domain
  misc_feature: The sequence is a funtional homolog of Ceres CLONE ID no. 2721 at SEQ ID NO. 203 with e-value of 9.40E-39 and BLAST sequence identity of 77.5
  misc_feature: Xaa can be any naturally occurring amino acid
  misc_feature: Xaa can be any naturally occurring amino acid
  misc_feature: Xaa can be any naturally occurring amino acid
MATIATSLNIATQRAIXSENRPARLACPVRLNNPWNLGSRTTNRLVSFRPVKSAPEGVISDKVEKSIKDXEETCAGDPVSGECVAAWDEVEELSAAASXARDKKKAE

SEQ ID NO: 212 - protein, 125 aa, Brassica napus
  misc_feature: Ceres CLONE ID no. 960043
  misc_feature (54)..(125): Pfam Name. CP12 Pfam Description. CP12 domain
  misc_feature: The sequence is a funtional homolog of Ceres CLONE ID no. 2721 at SEQ ID NO. 203 with e-value of 1.29E-41 and BLAST sequence identity of 77.2
MATIAATGLNVATPSAFVRPVARLSAPVRLNYPWKFSSMNRMVMSVKATSEGGISDKVEKSIQEAKETCADDPVSGECVAAWDEVEELSAAASHARDKKKAGGSDPLEEYCSDNPETDECRTYDN

SEQ ID NO: 213 - protein, 123 aa, Panicum virgatum
  misc_feature: Ceres CLONE ID no. 1782555
  misc_feature (53)..(123): Pfam Name. CP12 Pfam Description. CP12 domain
  misc_feature: The sequence is a funtional homolog of Ceres CLONE ID no. 2721 at SEQ ID NO. 203 with e-value of 9.10E-25 and BLAST sequence identity of 76.3
MASTVASLSTPAAAFAAADVVPRRKIAGRVWFPVARRVGFTVRSSRPGTPPGISDKVSESIKKAEETCADEKVSGECAAAWDEVEELSAAASHARDRLKENSDPLENYCKENPETDECRIYDN

SEQ ID NO: 214 - protein, 162 aa, Brassica napus
  misc_feature: Ceres CLONE ID no. 1036232
  misc_feature (77)..(148): Pfam Name. CP12 Pfam Description. CP12 domain
  misc_feature: The sequence is a funtional homolog of Ceres CLONE ID no. 2721 at SEQ ID NO. 203 with e-value of 2.40E-49 and BLAST sequence identity of 76.1
  misc_feature: Xaa can be any naturally occurring amino acid
  misc_feature: Xaa can be any naturally occurring amino acid
MYHKNHSKPACIFLFIQTMATIATSLNIATQRAVITSKSQPARLACPVRLNNPWKLGSRTNRLVSFRPVKSTPEGVISDKVEKSIKDAKESCADDPVSGECVAAWDEVEELSAAASHARDKKKAGGSDPLEEYCKDNPETDECRXYDNXKLIDHVPGFGLHI

SEQ ID NO: 215 - DNA, 492 bp, Arabidopsis thaliana
  misc_feature: Ceres CLONE ID no. 30018
  misc_feature: Ceres SEED LINE ME06741
  misc_feature: The sequence encodes the protein given in SEQ ID NO. 216
atttctgattagttgcgaaaaatctcatcgtctctcttcttcgctctcgccattgtcgtagatcgctttctctaaccctaaaatacgtagagagatcagatacctgaaaacaaccaatcaatcatggagtacgctgctcggagaaatcagaaaggcgctttcgaaggcttttacaaacttatcatgcgccgtaattccgtctacgtcactttcatcatcgccggcgcatttttcggtgaacgggctgtggattacggtgttcataagctctgggaacgcaacaatgttgggaaacgatatgaagacatctctgtgttgggtcaaaggccagtagaggaatgagctttcttctttttgaattctcttcagaccaaaagcaagaattggaaatttccatgttgttttgcattccaacgtctctctttctttgttgaataaatataaaatcattgggatgattcatatttcacctaaagctatctggttctgatt

SEQ ID NO: 216 - protein, 72 aa, Arabidopsis thaliana
  misc_feature: Ceres CLONE ID no. 30018
  misc_feature (13)..(69): Pfam Name. UCR_UQCRX_QCR9 Pfam Description. Ubiquinol-cytochrome C reductase, UQCRX/QCR9 like
  misc_feature: Ceres SEED LINE ME06741
MEYAARRNQKGAFEGFYKLIMRRNSVYVTFIIAGAFFGERAVDYGVHKLWERNNVGKRYEDISVLGQRPVEE

SEQ ID NO: 217 - DNA, 216 bp, Populus balsamifera subsp. trichocarpa
  misc_feature: Ceres ANNOT ID no. 1488347
  misc_feature: The sequence is a funtional homolog of Ceres CLONE ID no. 30018 at SEQ ID NO. 216 with e-value of 2.29E-26 and BLAST sequence identity of 81.6
atggattacacagcacggagaaatggaggaggcgtgttcgaaggtctctacaagttgattatgcgccgtaactccatctacgttaccttcgtcatcgccggcgcttttgccggtgagcgggctgtggattatggagttcgtaaactatgggagcacaacaatgttgggaaacgttacgaggacattccagttttggggcaaaggccatcagaatga

SEQ ID NO: 218 - protein, 71 aa, Populus balsamifera subsp. trichocarpa
  misc_feature: Ceres ANNOT ID no. 1488347
  misc_feature (13)..(69): Pfam Name. UCR_UQCRX_QCR9 Pfam Description. Ubiquinol-cytochrome C reductase, UQCRX/QCR9 like
  misc_feature: The sequence is a funtional homolog of Ceres CLONE ID no. 30018 at SEQ ID NO. 216 with e-value of 2.29E-26 and BLAST sequence identity of 81.6
MDYTARRNGGGVFEGLYKLIMRRNSIYVTFVIAGAFAGERAVDYGVRKLWEHNNVGKRYEDIPVLGQRPSE

SEQ ID NO: 219 - DNA, 219 bp, Populus balsamifera subsp. trichocarpa
  misc_feature: Ceres ANNOT ID no. 1513719
  misc_feature: The sequence is a funtional homolog of Ceres CLONE ID no. 30018 at SEQ ID NO. 216 with e-value of 9.10E-25 and BLAST sequence identity of 76.3
atggattctacaccacgaagaagtggaggaggcgtgttcgaaggtatctacaagttgattatgcgccgtaactccatctacgttaccttcgtcatcgccggcgcttttgccggtgagagggctgtggattatggtgttcgtaaactatgggagtacaacaatattgggaaacgttatgaagatattccagttttggggcaaaggccaacagaagaatga

SEQ ID NO: 220 - protein, 72 aa, Populus balsamifera subsp. trichocarpa
  misc_feature: Ceres ANNOT ID no. 1513719
  misc_feature (13)..(69): Pfam Name. UCR_UQCRX_QCR9 Pfam Description. Ubiquinol-cytochrome C reductase, UQCRX/QCR9 like
  misc_feature: The sequence is a funtional homolog of Ceres CLONE ID no. 30018 at SEQ ID NO. 216 with e-value of 9.10E-25 and BLAST sequence identity of 76.3
MDSTPRRSGGGVFEGIYKLIMRRNSIYVTFVIAGAFAGERAVDYGVRKLWEYNNIGKRYEDIPVLGQRPTEE

SEQ ID NO: 221 - protein, 72 aa, Solanum tuberosum
  misc_feature: Public GI no. 633685
  misc_feature (13)..(69): Pfam Name. UCR_UQCRX_QCR9 Pfam Description. Ubiquinol-cytochrome C reductase, UQCRX/QCR9 like
  misc_feature: The sequence is a funtional homolog of Ceres CLONE ID no. 30018 at SEQ ID NO. 216 with e-value of 1.50E-24 and BLAST sequence identity of 76.3
MESAARRSGGGVLEGFYRLVMRRTPVYVTFVIAGALLGERAVDYGVKTLWEKNNVGKRYEDISVLGQRPVDE

SEQ ID NO: 222 - protein, 71 aa, Glycine max
  misc_feature: Ceres CLONE ID no. 853331
  misc_feature (13)..(69): Pfam Name. UCR_UQCRX_QCR9 Pfam Description. Ubiquinol-cytochrome C reductase, UQCRX/QCR9 like
  misc_feature: The sequence is a funtional homolog of Ceres CLONE ID no. 30018 at SEQ ID NO. 216 with e-value of 8.19E-24 and BLAST sequence identity of 76.0
MEAVSRRRGGGIFESLYKVVMRRNSVYVTFVIAGAFLGERAVDYGVHKLWEANNVGKRYEDIPVLGQRQSE

SEQ ID NO: 223 - protein, 63 aa, Zea mays
  misc_feature: Ceres CLONE ID no. 208991
  misc_feature (4)..(60): Pfam Name. UCR_UQCRX_QCR9 Pfam Description. Ubiquinol-cytochrome C reductase, UQCRX/QCR9 like
  misc_feature: The sequence is a funtional homolog of Ceres CLONE ID no. 30018 at SEQ ID NO. 216 with e-value of 8.40E-22 and BLAST sequence identity of 74.1
MGFLDALYRVVMRRNAVYVTFVVAGAFAGERAVDYGVHKIWEMNNLGKRYEDISVLGQRPAEE

SEQ ID NO: 224 - protein, 63 aa, Zea mays
  misc_feature: Ceres CLONE ID no. 336493
  misc_feature (4)..(60): Pfam Name. UCR_UQCRX_QCR9 Pfam Description. Ubiquinol-cytochrome C reductase, UQCRX/QCR9 like
  misc_feature: The sequence is a funtional homolog of Ceres CLONE ID no. 30018 at SEQ ID NO. 216 with e-value of 2.19E-21 and BLAST sequence identity of 72.5
MGLLDSLYRVVMRRNAVYVTFVVAGAFAGERAVDYGVHKIWEMNNLGKRYEDIPVLGQRPAEE

SEQ ID NO: 225 - protein, 63 aa, Zea mays
  misc_feature: Ceres CLONE ID no. 1064967
  misc_feature (4)..(60): Pfam Name. UCR_UQCRX_QCR9 Pfam Description. Ubiquinol-cytochrome C reductase, UQCRX/QCR9 like
  misc_feature: The sequence is a funtional homolog of Ceres CLONE ID no. 30018 at SEQ ID NO. 216 with e-value of 5.89E-21 and BLAST sequence identity of 72.5
MGLWDAMYRVVMRRNGVYVTFVVAGAFAGERLVDYGVNKVWEMNNVGKRYQDISVLGQRPVEE

SEQ ID NO: 226 - protein, 63 aa, Triticum aestivum; identical to SEQ ID NO: 225
  misc_feature: Ceres CLONE ID no. 639802
  misc_feature (4)..(60): Pfam Name. UCR_UQCRX_QCR9 Pfam Description. Ubiquinol-cytochrome C reductase, UQCRX/QCR9 like
  misc_feature: The sequence is a funtional homolog of Ceres CLONE ID no. 30018 at SEQ ID NO. 216 with e-value of 5.89E-21 and BLAST sequence identity of 72.5

SEQ ID NO: 227 - protein, 62 aa, Chlorella protothecoides
  misc_feature: Public GI no. 4775284
  misc_feature (4)..(60): Pfam Name. UCR_UQCRX_QCR9 Pfam Description. Ubiquinol-cytochrome C reductase, UQCRX/QCR9 like
  misc_feature: The sequence is a funtional homolog of Ceres CLONE ID no. 30018 at SEQ ID NO. 216 with e-value of 7.70E-12 and BLAST sequence identity of 58.3
MGALDVFYKTIVRRNSVYVGFILVGAFFGEQAVDKVGNSLWESNNKGKLFKDIVASQQEADA

SEQ ID NO: 228 - DNA, 1649 bp, Arabidopsis thaliana
  misc_feature: Ceres CLONE ID no. 36334
  misc_feature: Ceres SEED LINE ME06302
  misc_feature: The sequence encodes the protein given in SEQ ID NO. 229
tccattaatactctctctccctcatcctctcttcttctctcatcatcatcttcttcttcaatggccttcaccgcttttctcctcctcctctcttccatcgccgccggcttcctcctcctactccgccgtacacgttaccgtcggatgggtcttcctccgggaagccttggtctccctctgataggagagacttttcagctgatcggagcttacaaaacagagaaccctgagcctttcatcgacgagagagtagcccggtacggttcggttttcatgacgcatctttttggtgaaccgacgattttctcagctgacccggaaacgaaccggtttgttcttcagaacgaagggaagctttttgagtgttcttatcctgcttccatttgtaaccttttggggaaacactctctgcttcttatgaaaggttctttgcataaacgtatgcactctctcaccatgagctttgctaattcttcaatcattaaagaccatctcatgcttgatattgaccggttagtccggtttaatcttgattcttggtcctctcgtgttctcctcatggaagaagccaaaaagataacgtttgagctaacggtgaagcagttgatgagctttgatccaggggaatggagtgagagtttaaggaaagagtatcttcttgtcatcgaaggcttcttctctcttcctctccctctcttctccaccacttaccgcaaagccatccaagcgcggaggaaggtggcggaggcgttgacggtggtggtgatgaaaaggagggaggaggaggaagaaggagcggagagaaagaaagatatgcttgcggcgttgcttgcggcggatgatggattttccgatgaagagattgttgacttcttggtggctttacttgtcgccggttatgaaacaacctccacgatcatgactctcgccgtcaaatttctcaccgagactcctttagctcttgctcaactcaaggaagagcatgaaaagattagggcaatgaagagtgattcgtatagtcttgaatggagtgattacaagtcaatgccattcacacaatgtgtggttaatgagacgctacgagtggctaacatcatcggcggtgttttcagacgtgcaatgacggatgttgagatcaaaggttataaaattccaaaagggtggaaagtattctcatcgtttagagcggttcatttagacccaaaccacttcaaagatgctcgcactttcaacccttggagatggcagagcaactcggtaacgacaggcccttctaatgtgttcacaccgtttggtggagggccaaggctatgtcccggttacgagctggctagggttgcactctctgttttccttcaccgcctagtgacaggcttcagttgggttcctgcagagcaagacaagctggttttctttccaactacaagaacgcagaaacggtacccgatcttcgtgaagcgccgtgattttgctacttgaagaagaagagacccatctgattttatttatagaacaacagtatttttcaggattaatttcttcttctttttttgcctccttgtgggtctagtgtttgacaataaaagttatcattactctataaagccttagcttctgtgtacataaaaaaaaaaaaacttttgtttacc

SEQ ID NO: 229 - protein, 472 aa, Arabidopsis thaliana
  misc_feature: Ceres CLONE ID no. 36334
  misc_feature (205)..(467): Pfam Name. p450 Pfam Description. Cytochrome P450
  misc_feature: Ceres SEED LINE ME06302
MAFTAFLLLLSSIAAGFLLLLRRTRYRRMGLPPGSLGLPLIGETFQLIGAYKTENPEPFIDERVARYGSVFMTHLFGEPTIFSADPETNRFVLQNEGKLFECSYPASICNLLGKHSLLLMKGSLHKRMHSLTMSFANSSIIKDHLMLDIDRLVRFNLDSWSSRVLLMEEAKKITFELTVKQLMSFDPGEWSESLRKEYLLVIEGFFSLPLPLFSTTYRKAIQARRKVAEALTVVVMKRREEEEEGAERKKDMLAALLAADDGFSDEEIVDFLVALLVAGYETTSTIMTLAVKFLTETPLALAQLKEEHEKIRAMKSDSYSLEWSDYKSMPFTQCVVNETLRVANIIGGVFRRAMTDVEIKGYKIPKGWKVFSSFRAVHLDPNHFKDARTFNPWRWQSNSVTTGPSNVFTPFGGGPRLCPGYELARVALSVFLHRLVTGFSWVPAEQDKLVFFPTTRTQKRYPIFVKRRDFAT

SEQ ID NO: 230 - protein, 479 aa, Glycine max
  misc_feature: Ceres CLONE ID no. 690176
  misc_feature (212)..(469): Pfam Name. p450 Pfam Description. Cytochrome P450
  misc_feature: The sequence is a funtional homolog of Ceres CLONE ID no. 36334 at SEQ ID NO. 229 with e-value of 0.0 and BLAST sequence identity of 79.1
MASFIFTPVLFLLIISAVLLFLHRRSRCRRFRLPPGTLGLPFVGETLQLISAYKSDNPEPFMDQRVKRYGPIFTTHVFGEPTVFSTDPETNRFILLNEGKLFECSYPGSISNLLGKHSLLLMKGSLHKRMHSLTMSFANSSIIKDHLLVDIDRLIRLNLDSWSDRVLLMEEAKKITFELTVKQLMSFDPGEWTETLRKEYVLVIEGFFSVPLPLFSSTYRRAIKARTKVAEALTLVVRDRRKESVTEEKKNDMLGALLASGYHFSDEEIVDFMLALLVAGYETTSTIMTLAIKFLTETPLALAQLKEEHDQIRAKKSCPEAPLEWTDYKSMAFTQCVVNETLRVANIIGAIFRRAMTDINIKGYTIPKGWRVVASFRAVHLNPDHFKDARTFNPWRWQSNSEASSPGNVYTPFGGGPRLCPGYELARVVLSVFLHRIVTRYSWFPAEEDKLVFFPTTRTQKRYPIIVKRREESKLSKSP

SEQ ID NO: 231 - DNA, 1431 bp, Populus balsamifera subsp. trichocarpa
  misc_feature: Ceres ANNOT ID no. 1464715
  misc_feature: The sequence is a funtional homolog of Ceres CLONE ID no. 36334 at SEQ ID NO. 229 with e-value of 2.09E-198 and BLAST sequence identity of 79.0
atggcggttatttctctttatttggttttctttgtggttctcccggcgatagtccttatcgctcaccggagttcgcggtgccgacggctccggttgccgccggggagtttgggtctgccctttgttggggagactctacagttgatatctgcatacaagaccgagaaccctgaaccgtttatagatgagcgggtgagccggttcggttcgttgtttacgacccatgttttcggtgaacccactgttttttctgttgatccggaaacgaaccggttcatcatgcaaaatgaagggaagttgtttgagtgtagttacccgggttcgataagcaacttgctgggaaaacactccttgttgttgatgaagggcagtcttcacaaaagaatgcactctttgaccatgagttttgctaactcttcaatcattagagaccatcttctggttgatatagaccggttgatccgtctcaatttagattcctggtctgaccgggttcttctcatggaggaggccaagaagattacatttgagttgacaatgaagcagctaatgagctttgatccatgtgaatggaccgagagtctaagaaaagagtacgttcttgttattgaaggctttttcagtgtgccactacccatcttttcccccacttaccgcagagctatcaaagctaggactaaggtggcagaggctttgagcttggtagtgaagcaaaggaggatagagagtgagtcaggagagaaaaggaaggacatgctggcagctcttgtagcttcagatgatcatggcagcttctcggacgaggaaatagtggatttcttggtagctttgcttgtcgcaggctatgaaactacatctactagcatgactcttgctgtcaagttcctcactgagacacctctcgctttggctcagatcacggaggagcatgaacagattagagcaaagaagggtgagggggaagctcttgagtggagtgattacaagtcaatgaccttcactcaatgcgttgttaatgagacgctgagaatcgcgaacattataggtgggatatttagacgaacgatgacagatatcaatgtaaaaggctatacaattcctaaaggatggaaggtttttgcatcctttcgtggtgtgcatttagaccacgaatactttaaagatgctcggactttcaatccatggagatggcagaacaactcgggggcaacatgcccagcaaatgtgttcactccatttggaggagggcaacggctatgcccaggatatgagcttgctagagtagaactctctgttttccttcaccacctagtcacccgtttcagttggactccagctggagaagataagctggttttctttccaactacacggacacagaagcgatatcccatcaatgtgcagcgtcgagatcgtgtccaagccatgtaa

SEQ ID NO: 232 - protein, 476 aa, Populus balsamifera subsp. trichocarpa
  misc_feature: Ceres ANNOT ID no. 1464715
  misc_feature (211)..(467): Pfam Name. p450 Pfam Description. Cytochrome P450
  misc_feature: The sequence is a funtional homolog of Ceres CLONE ID no. 36334 at SEQ ID NO. 229 with e-value of 2.09E-198 and BLAST sequence identity of 79.0
MAVISLYLVFFVVLPAIVLIAHRSSRCRRLRLPPGSLGLPFVGETLQLISAYKTENPEPFIDERVSRFGSLFTTHVFGEPTVFSVDPETNRFIMQNEGKLFECSYPGSISNLLGKHSLLLMKGSLHKRMHSLTMSFANSSIIRDHLLVDIDRLIRLNLDSWSDRVLLMEEAKKITFELTMKQLMSFDPCEWTESLRKEYVLVIEGFFSVPLPIFSPTYRRAIKARTKVAEALSLVVKQRRIESESGEKRKDMLAALVASDDHGSFSDEEIVDFLVALLVAGYETTSTSMTLAVKFLTETPLALAQITEEHEQIRAKKGEGEALEWSDYKSMTFTQCVVNETLRIANIIGGIFRRTMTDINVKGYTIPKGWKVFASFRGVHLDHEYFKDARTFNPWRWQNNSGATCPANVFTPFGGGQRLCPGYELARVELSVFLHHLVTRFSWTPAGEDKLVFFPTTRTQKRYPINVQRRDRVQAM

SEQ ID NO: 233 - protein, 472 aa, Glycine max
  misc_feature: Ceres CLONE ID no. 574698
  misc_feature (212)..(470): Pfam Name. p450 Pfam Description. Cytochrome P450
  misc_feature: The sequence is a funtional homolog of Ceres CLONE ID no. 36334 at SEQ ID NO. 229 with e-value of 0.0 and BLAST sequence identity of 78.1
MASLPALPTLLLSFAAIFFTVLLLFLRRRQLRLPPGSYGLPLIGETLQLISAYKSDNPEPFIDERVERYGSIFTTHVFGEATVFSADPEVNRFILQNEGRLLDCSYPGSISNLLGKHSLLLMKGGLHKRMHSLTMSLANSSIIKDHLLHHIDRLVCLNLDAWSNRVFLMDQAKKITFELTVKQLMSFDPDEWTENLRKEYVLVIEGFFTLPFPLFSTTYRRAIKARTKVAEALTLVVRQRRKEYDEDKEKKNDMLGALLASGDHFSDEEIVDFLLALLVAGYETTSTIMTLAIKFLTETPLALAQLKEEHDQIRARSDPGTPLEWTDYKSMAFTQCVVNETLRVANIIGGIFRRARTDIDIKGYTIPKGWKVFASFRAVHLNPEHYKDARSFNPWRWQSNSSEATNPGNVYTPFGGGPRLCPGYKLARVVLSVFLHRIVTRFSWVPAEEDKLVFFPTTRTQKRYPIIVQRRD

SEQ ID NO: 234 - protein, 474 aa, Vigna radiata
  misc_feature: Public GI no. 9587211
  misc_feature (210)..(468): Pfam Name. p450 Pfam Description. Cytochrome P450
  misc_feature: The sequence is a funtional homolog of Ceres CLONE ID no. 36334 at SEQ ID NO. 229 with e-value of 0.0 and BLAST sequence identity of 77.9
MVSLPTLLLLFAASAAAIFLHRAFSRRKFRLPPGSYGLPFIGETLQLISAYKSSNPEPFMDERVRRYGSIFMTHVFGEPTVFSADPELNRFILQNEGKLLDCSYPGSISNLLGKHSLLLMKGALHKRMHSLTMSFANSSIIKDHLLHHIDRLIGLNLDTWSDRVTLMDQAKKITFELTVKQLMSFDPDEWTESLRKEYVLVIEGFFTLPLPLFSTTYRRAIKARTKVAEALTLVVRQRREEYNQGKEKKSDMLGALLASGDHFSDDQIVDFLLALLVAGYETTSTIMTLAVKFLTETPLALAQLKEEHDQIRARSDPGAPLEWTDYKSMVFTQHVVNETLRVANIIGGIFRRATTDIDIKGYTIPKGWKVFASFRAVHLNPEYYKDARTFNPWRWQSNSSEAANPANVYTPFGGGPRLCPGYELARVVLSVFLHRIVTRFSWVPAEEDKLVFFPTTRTQKRYPIIVKRRNANHV

SEQ ID NO: 235 - protein, 472 aa, Glycine max
  misc_feature: Ceres CLONE ID no. 718939
  misc_feature (212)..(470): Pfam Name. p450 Pfam Description. Cytochrome P450
  misc_feature: The sequence is a funtional homolog of Ceres CLONE ID no. 36334 at SEQ ID NO. 229 with e-value of 0.0 and BLAST sequence identity of 77.8
MASLPTLLSFAVIFFTVALLYLRRVFRRRQFRLPPGSHGLPLIGETLQLISAYKSDNPEPFIDERVERYGSIFTTHVFGEPTVFSADPEVNRFILQNEGKLLDCSYPGSISNLLGKHSLLLMKGALHKRMHSLTMSFANSSIIKDHLLHHIDRLICLNLDAWSDTVFLMDQAKKITFELTVKQLMSFDPDEWTENLRKEYVLVIEGFFTLPFPLFSTTYRRAIKARTKVAEALALVVRQRRKEYGENKEKKSDMLGALLASGDHLSDEEIVDFLLALLVAGYETTSTIMTLAIKFLTETPLALAQLKEEHDQIRAKSHPGAPLEWTDYKSMAFTQCVVNETLRVANIIGGIFRRATTDINIKGYTIPKGWKVFASFRAVHLNPEHYKDARSFNPWRWQSNSSETANPGNVYTPFGGGPRLCPGYELARVVLSVFLHRIVTRFSWVPAEEDKLVFFPTTRTQKRYPIIVQRRH

SEQ ID NO: 236 - DNA, 1419 bp, Populus balsamifera subsp. trichocarpa
  misc_feature: Ceres ANNOT ID no. 1511511
  misc_feature: The sequence is a funtional homolog of Ceres CLONE ID no. 36334 at SEQ ID NO. 229 with e-value of 1.49E-197 and BLAST sequence identity of 77.7
atggcggtttctgtttgtcttgttctctttattgttctcccagcgatagtctttatcgttcacaggagttcccggttccggaggctccggctgccgccggggagtttgggtctgccctttgttggagagactctacagctgatatctgcatacaagactgagaaccctgaaccgtttatagatgagcgggtgaaccggttcggttcgttgtttaaaacccatatttttggtgaaccgaccgttttttctgttgacccggaaacgaacaggttcattttgcaaaatgaagggaagctgtttgagtgtagttaccccggttcgataagcaacctgctgggaaaacattctttgttgctaatgacgggtaatcttcacaaaaaaatgcattccttaaccatgagtttcgctaactcttcaatcatcagagaccatctcttggtcgatatagaccggttgatccgtctcaatttagattcttggtccgaccgggttcttctcatggaggaggccaagaagactacatttgagttgacaatgaagcagctaatgagctttgatccatgtgaatggaccgagagtctgagaagagagtacgtgcttgttattgaaggctttttcagcgtgcctctacccatcctttcccccacataccgcagagctatcaaagctaggactaaggtggcagaggctttgagtttggtagtgaagcaaaggaggatagagagtgagtcaggagagaaaaagaaagacatgcttggagctcttttagcttcagatgatcatggaggcttctcggacgaggagatagtagatttcttggtggctctgcttgttgcaggctatgaaactacatctacaagcatgactcttgctgttaagttcctcaccgagacacctctggctctggctcagatcaaggaggagcatgaacagattagaggaaagaagggcgaggagggagctcttgagtggagtgattacaagtcaatgaccttcactcagtgtgttgttaatgagactttgagaatagcaaacataataggtgggatatttagacgaacaatgacagatataaatgttaaaggttatacaattcctaaaggatggaaggtttttgcatcctttcgtggtgtacatttagaccatgaatacttcaaagatgctcgaactttcaatccgtggagatggcaggacgactcgggggcaacatgcccagcaaatgtgttcactccttttggaggagggcaacggttatgcccaggatatgaacttgctagagtagaactctctgttttccttcaccacctggtcacccgtttcagttggaccccagctgaacaagacaagctggttttctttccaactacgcggacacaaaagcgatatcccatcaatgtgcagcgtcgaaatcgtgtctaa

SEQ ID NO: 237 - protein, 472 aa, Populus balsamifera subsp. trichocarpa
  misc_feature: Ceres ANNOT ID no. 1511511
  misc_feature (210)..(466): Pfam Name. p450 Pfam Description. Cytochrome P450
  misc_feature: The sequence is a funtional homolog of Ceres CLONE ID no. 36334 at SEQ ID NO. 229 with e-value of 1.49E-197 and BLAST sequence identity of 77.7
MAVSVCLVLFIVLPAIVFIVHRSSRFRRLRLPPGSLGLPFVGETLQLISAYKTENPEPFIDERVNRFGSLFKTHIFGEPTVFSVDPETNRFILQNEGKLFECSYPGSISNLLGKHSLLLMTGNLHKKMHSLTMSFANSSIIRDHLLVDIDRLIRLNLDSWSDRVLLMEEAKKTTFELTMKQLMSFDPCEWTESLRREYVLVIEGFFSVPLPILSPTYRRAIKARTKVAEALSLVVKQRRIESESGEKKKDMLGALLASDDHGGFSDEEIVDFLVALLVAGYETTSTSMTLAVKFLTETPLALAQIKEEHEQIRGKKGEEGALEWSDYKSMTFTQCVVNETLRIANIIGGIFRRTMTDINVKGYTIPKGWKVFASFRGVHLDHEYFKDARTFNPWRWQDDSGATCPANVFTPFGGGQRLCPGYELARVELSVFLHHLVTRFSWTPAEQDKLVFFPTTRTQKRYPINVQRRNRV

SEQ ID NO: 238 - protein, 483 aa, Nicotiana tabacum
  misc_feature: Public GI no. 45260636
  misc_feature (215)..(474): Pfam Name. p450 Pfam Description. Cytochrome P450
  misc_feature: The sequence is a funtional homolog of Ceres CLONE ID no. 36334 at SEQ ID NO. 229 with e-value of 0.0 and BLAST sequence identity of 75.4
MDFIIYLFLSFSISLITFLLLRAAAAAHFRRRKTRLPPGTLGLPFIGETLQLISAYKTENPEPFIDDRVSKYGNIFTTHIFGEPTVFSTDAETNRFILQNEGRPFESSYPSSLQNLLGKHSLLLMRGSLHKRMHSLTMSFANSSILKDHLLADIDRLVRLNLDSWTGRVFLMEEAKKITFNLTVKQLMSLDPCEWTEKLMKEYMLVIEGFFTIPLPFFSSTYRKAIQARRKVAEALGLVVKERRKERGGGERLKNDMLEALFEGDGVEGFSDEVIVDFMLALLVAGYETTSTIMTLAVKFLTETPHALSLLKEEHEEIRLRKGDVESLLWEDYKSMPFTQCVVNETLRVGNIISGVFRRTMTDINIKGYTIPKGWKVFACFRAVHLDHEHFKDARTFDPWRWQSNAGSTSSPNVFTPFGGGPRRCPGYELARVELSVFLHHLVTRHSWVPAEPDKLVFFPTTRMQKRYPIIVQRRSLFDPCKE

SEQ ID NO: 239 - protein, 473 aa, Artemisia annua
  misc_feature: Public GI no. 86279652
  misc_feature (213)..(466): Pfam Name. p450 Pfam Description. Cytochrome P450
  misc_feature: The sequence is a funtional homolog of Ceres CLONE ID no. 36334 at SEQ ID NO. 229 with e-value of 1.49E-197 and BLAST sequence identity of 72.0
  misc_feature: Xaa can be any naturally occurring amino acid
MELYTTSLLFIVSFSTIIFLLFRRNSAFWRSINTPPGSTGLPLIGETFQIISAYKTENPEPFIDARVXKYGSVFTTHVFGERTVFSADVEINKFILQNEGRLFESSYPGSIANLVGKHSLLLMRGGLHRRMHSLTMSFANSTIIKDHLLADIDRLVRLNLDSWTGRILLMDEAKKITFELTLKQLLSIEPCEWSENLRKEYMLVIEGFFCIPLPFFSLTYRRAIQARKRVTEALHLVVRERRIEREKGVKKNDMLAALFDSDGDEENFYDDEIVDFLVSLLVAGYDTTSTTMTLAVKYLTDTPSALAQLKEEHDAIRAKKGASVALEWDDYKSMPFTQCVVNETLRLSNIISGVFRRAITDVKIKDYTIPKGAKVFTSLRAVHLDQDNFEDARVFNPWRWQKTSDSASFMPFGGGPRRCPGHELARVALSVFLHHLITHFSWKPAEEDKVVFFPTTRTQKRYPIIVEQRNVVG

SEQ ID NO: 240 - protein, 471 aa, Zinnia elegans
  misc_feature: Public GI no. 71834072
  misc_feature (214)..(464): Pfam Name. p450 Pfam Description. Cytochrome P450
  misc_feature: The sequence is a funtional homolog of Ceres CLONE ID no. 36334 at SEQ ID NO. 229 with e-value of 1.49E-197 and BLAST sequence identity of 70.7
MITIDLLLSPLSLLLLSLSTILIILHTTTSSRRNHHSPPGATGIPFIGETLQLISAYKTENPEPFIDTRVEKYGVVFTTHVFGERTVFSADGETNRFILKNEGRLFESSYPGSIANLVGKNSLLLMRGGLHRRMHSLTMSFANSTIIKDHLLVDIDRLVRLNLDAWTGRILLMDEAKKITFELTLKQLLSIEPFEWSENLRKEYMLVIEGFFCIPLPFFPLTYRRAIQARKRVTEALHLVVRERRVERERGVKKNDMLAALFDNDCDDDEIVDLLVSLLVAGYDTTPTTMTLAVKYLTDTPSALAQLKEEHEQITRKKGALVALEWDDYKSMPFTQCVVNETLRLSNIISGVFRRAMTDVKIKDFTIPKGSKVFASLRAVHLDLENFEDARVFYPWRWQKISDPANFMPFGGGPRRCPGHELARVALSVFLHHLITRFSWIPAEEDKLVFFPTTRTQKRYPIIVQKRNVVE

SEQ ID NO: 241 - protein, 501 aa, Oryza sativa subsp. japonica
  misc_feature: Public GI no. 60677685
  misc_feature (209)..(493): Pfam Name. p450 Pfam Description. Cytochrome P450
  misc_feature: The sequence is a funtional homolog of Ceres CLONE ID no. 36334 at SEQ ID NO. 229 with e-value of 0.0 and BLAST sequence identity of 64.0
MAAAALLLLAAAAAAVVVAMALRWLLLLGGPAAGRLGKRARMPPGSTGLPLIGETLRLISAYKTPNPEPFIDERVARHGGVFTTHVFGERTVFSADPAFNRLLLAAEGRAVHSSYPSSIATLLGARSLLLTRGAAHKRLHSLTLTRLGRPASPPLLAHIDRLVLATMRQWEPAATVRLMDEAKKITFNLTVKQLVSIEPGPWTESLRREYVKLIDGFFSIPFPLAYFLPFTTYGQALKARKKVAGALREVIKKRMEEKAENGGSIGDDEGKKEKKDMVEELLQAEGGSFSEEEMVDFCLSLLVAGYETTSVLMTLAVKFLTETPAALAELKEEHANIRDMKGKNQPLEWSDYKSMPFTQCVINETLRVGNIISGVFRRANTDIHYKDYTIPKGCKIFASFRAVHLNNEHYENARTFNPWRWQINNKLQNAVGANIFTPFGGGPRLCPGYELARVVVSIFLHHLVTRFSWEETEEDRLVFFPTTRTLKGYPINLRLLSESIC

SEQ ID NO: 242 - protein, 510 aa, Zea mays
  misc_feature: Ceres CLONE ID no. 339347
  misc_feature (282)..(504): Pfam Name. p450 Pfam Description. Cytochrome P450
  misc_feature: The sequence is a funtional homolog of Ceres CLONE ID no. 36334 at SEQ ID NO. 229 with e-value of 0.0 and BLAST sequence identity of 63.1
MDAGGTPPLLFLLAAAAALLGAALRWLLLAWRSAARTGRLPPGSTGLPLIGETLRLIAAYKTPNPEPFIDERVARHGSGVFTTHVFGERTVFSADPAFNRLLLAAEGRAVSCSYPSSIATLLGPRSLLLTAGPAHKRLHSLTLARLGRPASPPLLAHIDRLVLATLRDWGRPGAGAVVRLLDEAKKITFNLTVWQLVSIEPGPWTESLRREYVKLVDGFFSIPFPFAYLLPFTAYGQALKARKKVAGALREVIRKRMGEEAGTGPGAGRNGEKKDMVEELLEAEGGSFSVEEMVDFCLSLLVAGYETTSVLMTLAVKFLTETPTALAQLKEEHDSIRHRKGKDEQPLQWSDYKSMPFTQCVISETLRVANLISGVFRRANTDIHFKDYVIPKGCRIFASFRAVHLSPEHYENARAFDPWRWQQSKKEGVLVVGQDAQQGARASVFTPFGGGPRLCPGHELARVVVSVFLHRLVTRFSWEEAEEDRVVFFPTTRTLKGYPIILRRRPGWDF

SEQ ID NO: 243 - protein, 501 aa, Oryza sativa subsp. japonica
  misc_feature: Public GI no. 77548615
  misc_feature (230)..(493): Pfam Name. p450 Pfam Description. Cytochrome P450
  misc_feature: The sequence is a funtional homolog of Ceres CLONE ID no. 36334 at SEQ ID NO. 229 with e-value of 3.4E-144 and BLAST sequence identity of 62.6
MAAAALLLLAAAAAIVVVAMVLRWLLLLGGPAAGRLGKRALMPPGSTGLPLIGETLRLISAYKTPNPEPFIDERVARHGGVFTTHVFGERTVFSADPAFNRLLLAAEGRAVHSSYPSSIATLLGARSLLLTRGAAHKRLHSLTLTRLGRPASPPLLAHIDRLVLATMRQWEPAATVRLMDEAKKITFNLTVKQLVSIEPGPWTESLRREYVKLIDGFFSIPFPLANLLPFTTYGQALKARKKVAGALREVIKKRMEEKAENGGSIGDDEGKKEKKDMVEELLEAEGGSFSEEEMVDFCLSLLVAGYETTSMLMTLAVKFLTETPAALAELKEEHANIRDMKGKKQPLEWSDYKSMPFTQCVINETLRVGNIISGVFRRANTDIHYKDYTIPKGCKIFASFRAVHLNNEHYENARTFNPWRWQINNKLQNAVGANIFTPFGGGPRLCPGYELARVVVSIFLHHLVTRFSWEETEEDRLVFFPTTRTLKGYPINLRLLSESIC

SEQ ID NO: 244 - DNA, 1211 bp, Arabidopsis thaliana
  misc_feature: Ceres CLONE ID no. 37493
  misc_feature: Ceres SEED LINE ME03531
  misc_feature: The sequence encodes the protein given in SEQ ID NO. 245
aaaaagagaatgggttctaagggagacaacgttgctgtatgtaacatgaagctcgagagacttctcagcatgaaaggtggcaaaggacaagacagctacgccaataactctcaagctcaggcaatgcatgcacggtccatgcttcacctcctagaggaaacacttgaaaatgttcacctcaactcctccgccagtccgccaccgttcacgacggttgatcttggctgttcctccggcgcaaatactgtccacataatcgatttcatagtcaaacatatctctaagaggtttgatgctgccggaatcgaccctccggagttcacagctttcttctccgatctcccaagcaacgacttcaacacgcttttccagcttcttccaccacttgtctctaacacttgcatggaggagtgtcttgctgccgacgggaaccgctcctacttcgtcgctggtgttcccggatcgttttaccggcgactttttccagcgagaaccattgactttttccactctgccttctccttgcattggctctctcaggtgccggaaagtgtgacggataggagatcggcggcgtacaatagagggagagttttcatacacggtgccggagagaagacaacaacggcatacaaacggcagtttcaggccgacttagcggagtttttgagggcaagagcggcagaggttaagagaggtggggccatgttcctggtctgtcttggtcgtacctctgtggatcccaccgaccagggtggtgccggtctactcttcggcactcattttcaggacgcttgggacgaccttgtccgcgagggtttggtagcagcagagaaacgagatggattcaatatcccggtgtacgcaccaagcttgcaagatttcaaggaagtagttgacgccaacggctcatttgcaattgataagctggtagtatacaaaggagggagtccacttgtggtgaatgagccagacgatgcatcagaagttggtcgtgcctttgctagtagttgtcggagtgtggccggagtgctcgtggaagctcacataggcgaagagctaagcaataaactgttctcacgagttgaaagccgagccactagccatgccaaagatgtcttggtgaatttgcagttcttccacattgtcgcttctttgtcttttacttaattagtaccaaataatatgaaaaagaaatatgttcgtgtgcc

SEQ ID NO: 245 - protein, 386 aa, Arabidopsis thaliana
  misc_feature: Ceres CLONE ID no. 37493
  misc_feature: Ceres SEED LINE ME03531
  misc_feature (48)..(386): Pfam Name. Methyltransf_7 Pfam Description. SAM dependent carboxyl methyltransferase
  misc_feature (48)..(386): Pfam Name. Methyltransf_7 Pfam Description. SAM dependent carboxyl methyltransferase
MGSKGDNVAVCNMKLERLLSMKGGKGQDSYANNSQAQAMHARSMLHLLEETLENVHLNSSASPPPFTTVDLGCSSGANTVHIIDFIVKHISKRFDAAGIDPPEFTAFFSDLPSNDFNTLFQLLPPLVSNTCMEECLAADGNRSYFVAGVPGSFYRRLFPARTIDFFHSAFSLHWLSQVPESVTDRRSAAYNRGRVFIHGAGEKTTTAYKRQFQADLAEFLRARAAEVKRGGAMFLVCLGRTSVDPTDQGGAGLLFGTHFQDAWDDLVREGLVAAEKRDGFNIPVYAPSLQDFKEVVDANGSFAIDKLVVYKGGSPLVVNEPDDASEVGRAFASSCRSVAGVLVEAHIGEELSNKLFSRVESRATSHAKDVLVNLQFFHIVASLSFT

SEQ ID NO: 246 - DNA, 1158 bp, Populus balsamifera subsp. trichocarpa
  misc_feature: Ceres ANNOT ID no. 1494370
  misc_feature: The sequence encodes the protein given in SEQ ID NO 247
atggctcctaaaggtgacaatgttgttgtgtctagtatgaagcttgagaagttgctttgcatgaagggaggcaaaggagaggcaagctatgccaataactctcaagctcaggccttacatgctcgatccatgcttcaccttctggaagaaaccctagatagggtgcacctaaactccccagaattccctttccaggtggcggacttagggtgctcatctggcaacaacaccatccacatcattgatgtcatcatcaagcatatgatcaagcgattcgagtcatccggactcgagccgccggagttctctgcttttttcgccgatctccctagcaatgacttcaacacccttttccagctcctccctcccccggccaattatgggggtagtatggaagagtgcctagctgctagtggccatcgaaactattttgcagctggagttcccggctcctttcaccggaggctttttccggcaagatcaattgacgttttccactcggcattttccttgcactggctctctcaggtgccggagtgtgttctagataagagatcagcagcatataacaaggggagggtgtttatccacaatgcaagcgagtccacaacaaatgcatacaagaaacagttccaaacagacctcgccggcttcctaagtgcaagatctcaagaaatgaagagcggtgggtccatgtttcttgtctgcttgggcagaacttctgccgaccccacagaccaaggtggggctggcctcctcttcgggacccactttcaggatgcctgggatgatcttgtccaggagggtctgattactagcgagaagcgtgacaatttcaacattccagtgtatgcaccaagcctccaagacttcaaggaagtagtggaagccaatggctcatttaccatagacaagctcgaggttttcaaaggagggagccctctggtggttaaccatcctgacaacgaagctgaggtcagccgggccatggctaattcctgccggagtgtggccggggtccttgttgatgcccacattggtgatgggctaagcgaggagttgttcttacgggtggagcaccgagccaaaagccatgcgaaagagcttctagagaagctgcaattcttccatatagttgcatctctttcttttgcttga

SEQ ID NO: 247 - protein, 385 aa, Populus balsamifera subsp. trichocarpa
  misc_feature: Ceres ANNOT ID no. 1494370
  misc_feature (48)..(385): Pfam Name. Methyltransf_7 Pfam Description. SAM dependent carboxyl methyltransferase
  misc_feature: The sequence is a funtional homolog of Ceres CLONE ID no. 37493 at SEQ ID NO. 245 with e-value of 3.00E-156 and BLAST sequence identity of 76.5
MAPKGDNVVVSSMKLEKLLCMKGGKGEASYANNSQAQALHARSMLHLLEETLDRVHLNSPEFPFQVADLGCSSGNNTIHIIDVIIKHMIKRFESSGLEPPEFSAFFADLPSNDFNTLFQLLPPPANYGGSMEECLAASGHRNYFAAGVPGSFHRRLFPARSIDVFHSAFSLHWLSQVPECVLDKRSAAYNKGRVFIHNASESTTNAYKKQFQTDLAGFLSARSQEMKSGGSMFLVCLGRTSADPTDQGGAGLLFGTHFQDAWDDLVQEGLITSEKRDNFNIPVYAPSLQDFKEVVEANGSFTIDKLEVFKGGSPLVVNHPDNEAEVSRAMANSCRSVAGVLVDAHIGDGLSEELFLRVEHRAKSHAKELLEKLQFFHIVASLSFA

SEQ ID NO: 248 - protein, 400 aa, Oryza sativa subsp. japonica
  misc_feature: Public GI no. 50929439
  misc_feature (55)..(399): Pfam Name. Methyltransf_7 Pfam Description. SAM dependent carboxyl methyltransferase
  misc_feature: The sequence is a funtional homolog of Ceres CLONE ID no. 37493 at SEQ ID NO. 245 with e-value of 8.49E-127 and BLAST sequence identity of 65.5
MASMKGENVTVSAAAAPRMKKLASMLCMKGGNGDGSYLNNSQAQALHARRMLHFLEETLDAMMERSSSDKLFTAADLGCSCGSNSLFIVDVIVRRVSEAYESRGRDAPEFQVFFSDLPSNDFNTLFQLLPPLLAPVAGSLEECLAAGEGAATATRPYHAAGVPGTFYGRLFPGESIDVFTSTFSLHWLSQVPEEVGDSASPAYNGGRVFVHRATEAVAAAYKRQFQADLARFLRSRAREMKRGGAMFLACLGRSSGDPADQGGAGLLFGTHFQDAWDDLVQEGVVEGEKRDSFNIPVYAPSLQEFRDVVRADGAFAIDRLELVRGGSPLVVDRPDDAAEVGRAMANSCKAVAGVLVDAHIGERRGAQLFERLERRAARHARELVEKMHFFHVVCSLSLAP

SEQ ID NO: 249 - protein, 333 aa, Glycine max
  misc_feature: Ceres CLONE ID no. 571162
  misc_feature: The sequence is a funtional homolog of Ceres CLONE ID no. 5344 at SEQ ID NO. 87 with e-value of 1.4E-103 and BLAST sequence identity of 61.6
  misc_feature (277)..(277): Xaa can be any naturally occurring amino acid
MVTMYGIWCFITVLLFSPVAFSELCNPQDKKVLLQIKKDFNNPYLLASWNPNTDCCNWYCVQCHPETHRINSLVILSSVPQTNLSGPIPPSVGDLPFLETLQFHKLPKLTGPIQPTIAKLTKLKEIYISWTNVSGPVPDFLARLTNLQFLDLSFNNLSGPIPSSLSQLSNLVSLRLDRNRLTGPIPESFGSFKKPGPSLWLSHNQLSGPIPASLANIDPQRIDFSRNKLEGDASVLFGRNKTTQIVDVSRNSLAFDLSKVEFPTSLISLDLNHNQIXGSIPVGLTAVDFLQGFNVSYNRLCGEIPQGGRLQKFDVYSYFHNKCLCGSPLTSCK

SEQ ID NO: 250 - DNA, 1836 bp, Oryza sativa
  misc_feature: Ceres Promoter p530c10
gcctctcgaccacgagtttagcacttgtgcaacatatatgcgtgcgatgaacatctactgatgcgccatgcgaattttagcgttcgttcatgacgcttccaacggcacagaggctgagcagcagcatgcatgcatggctcttgtgaaaacaaaaaaggttactggtaaatgacatgctgctgtagctagctagcagaatgcaaggcccatgcatatgcaatgctatgcgacaagtacagtaccagcatgtatggtagccagctaactaatctatcagcagaggcagcaagctcgtgcatggtgtgatgcacttctctccagtaatctagtggtaattttcacccaaagcgttgctcatatggacagtaattagtaatattaccaaggttcacaatcccgttacctgaccaaatactactcacgaatggtatctctggttttcgttaaaaccgttggtaaaccagcaaaaatagacaaaatttgtcaaaattttaaattttagttttttttttttaacttagccgggaaaccttgaagtttgtgctgtcgagctgtcctgggaaggacggttttggttgggattgtgaaccctggttactgcacttcatttttgaacagatattagtgcaacagacaaatgccaacgcatttttttctgtttaccggcaagctgaagcttttacgatccccatacagccgttgctgcaaacctgccaagaaagagcagcagaaacaggtgtcattttgtggtggaaagccaagtaaagtaaacagaagatggaagatagtgaggaccagggagtgaggcaggggacacatggcccacgcctccctgcacattttcgtgtataaatacaggtggatgcatcgctctcccagcatccatcggttctctgctctgttcatccatagagtttcctcctcttctcctttagtgcaaggtagagaagagcatgtgtgtgtgtgtgtgtgtgtgaactgtgaagtgcagagtgcttctgtagttctgtgttatgtccatagtgatcttgttaggattgttgctatggatgcatgatgttatggttgatctctgaattacagtagggacttttctgagatctctggattagtggggggtgctaaatttttttctggttgcatcagcttgggtttctggtattggtgtgggttcttgctctgaattttggttcagaatgtcgatttgtttgtgtttgttctctgaagttgagagtagctatgatccatccagcacagaactgcaggtcctgcctgccggctgcatatacaggacatgccattttgcaagctctgggcttatggtttctcttttggagttcttcttcttgcatgatctgtgttctctaacaaaggaagcaagatttagcaactttattcagagacaagaaaaggatctggcaaccttttgtttctgttttatcctactcgtaaagattgttatttaagcaaaaatttcccaaaagttttaaatataatttccatgatgtgccactctcatgtccttgaacctggcactcattatgggctcctcagaagtgctgtagctaatgtcactaatcttttgtatctttgttcatagtcttgtattttatgatgcttatccctttgtgctttccatgtttgatgtccaaatgtcatggcaatgtttttgacttctagtaggggttttagtacctttttgttagataagtacatccaaattctgtttatttattcaaaaatcattctgtttattcactgaaaacatttgtccattcaatggactcataaactgtctgtgtttttcaggcttgaggatccatctagaagatagca

SEQ ID NO: 251 - DNA, 3000 bp, Oryza sativa
  misc_feature: Ceres Promoter pOsFIE2-2
gcttaacacatgaactaccaaaatatactgatcactttgttctagtcatacataccttaagtcattttattctgcagtgtttggattggagggagcattctagcatcccttgggtcgttccagcaaatgtggttctccaaagcagagtaagcacaacacagtattttaggttatgtttcccctatctcgtcacggacagctcacaagttaatgtgatttatctcactatagatacgaagaacatggagtatcctacatccaaaggaagtgcccatgaagttgtggagcatcgctacgatttgtgaccaaatttgggtgcatgtgggcaatcgtattacagccaccctgttgttgatctatatcgactattatccgacgatatttatcattatattatgactagttagtttgtagattttgagagggcaacataagaagcaatccagcttaacctgttatgttcttgatggtagattctagttcatgtgttgaatctgttctccctgctgtagaatgtatcgagttgctgctctctactctgtacttttagaataccttttcaatcatttggagtcagctgattgttgtactacttatacgccacctgattagtcatgtcaacaattaaacttgagcactggttaagttaagagtggcctgattgtagttgataatcacattttattcgtagacattgtatgctggatctttatcagccaccgtcagatcatcctctgtaataaatcttcatcagacgtgtgtgccaatcgcaaggaacacgaaatgcatccgaaatgttactctgagttaatcaatactataattcttggtcaaattaattatttatatctataaagtttaaattaaatttaggaaaatgaattcatgcaaatcttgtggtaagttgtcaatttcataaaaaatccagcttactactccctttttaggagtgtgttgtggctgcacacttctgccttttgatatatacggttctattctcggtgtactcctttattattattaaaacaatcccagttacttggtaagtgctaatcacgaatcaaagtcaacataacaaatcatgtgcgtacagctataactcgattacacaaacaacaaaattcatatttgaacataaatccagttgtagcatatctggtagtataaagttttttttttgtatagaagagttttaatttctgtaagttttggaaagcatttaatcctagaaattgtagtgtagctcaactaaaaaataaatgaacttgaatcgaaattgggttgtatcataaatctttaccactcaaacgaatatttatcctaaaccacaaatgactcttttcatcaaggaatgttttgttttcagcattttaaaaaaaaacttttctaatatggttttcatgtttcgttcttttgaaatttaacatctatttaatttgcacggctccataaattcaacggatacatattctgaataattactaaggaggcatatatcggctctcttaatacaaccgcttgtttctcaaaatttattttgagttttgtctacacattctcaaggacggtacaaacacactatagatgttcacaattttttttttctaaagttgattgatggacaaatgtttgaacatataaacatataagcactgaatatttgcttatgcaggaggtatttatatcaagttcgatactttactaccatagtccctaggacactaaaatgccttcaatgatctgatgaagcctaagagagaatattgatcagtggagcgacttgcaactacacatggcacaagtagactagacacggtatatattcatattaacttgttaaaattttactacttaacagttcacttgtggtgcatccatatcaattcttacttacacaatatttgtaaaaacaacctaacactataggatgacctagacaacctttatgtcaatcacacttagaagatgatcgtctttttaataaataatgtgtactacacaccatgctctccatatagatcaagatctacaaacccttccacttataaaccttaccaccaaaaactcattaagttgcttcatttatctatgctattaagaaaaaaacttatttcgtttatgccatttctagaaatggctagtcacactattcacaatattatataataaataaaagtttcaaatattcatccaccaaaaatcatcaagtcgtgggacttatatgttaattagagaagtccctttgggtgcaatcgattttggaaaccctaaattttttctatacatagaagagagagatgtctagttgcaattgcttttgcgatgtgccaaccacccttctagctttcatccacgtctacttaattgccattcttcttcttctttttcttcactattactacctcctatcttagcgaatcttcttcttcttcactattactacctcccaccttagtgaattcatcctcattgttcacaatgacattgctaagttaactaggtatgctaagtacacaattagaatataacctagagcctttgtttccatcatacttaaaagatgacatttttatatagataaagtgtgctactcacaaggcttactatatatatgtatgatacacacaaactccacaacccaaaactctttcaagttgtgtggcccatctatgctattaaaaagcccatttagcccatccaacatgagaaaccctagggttttttccctataaaagatacctaggttattgttgcttttccaccccgcccgccgccgctccctattcctatttaatcccatctctcttcctcatcaccgctctcctctctccaggcaagaggtacgcactttttgtttcggatttgaaatctttgcttcgttttactatcattggtcataagttcttttttgaagatgtttgagaataagtttatcattgagattatcgtcacttgtgataggaagtacgcaacctcaagccggacaagacgtgagcaaag

SEQ ID NO: 252 - DNA, 2023 bp, Oryza sativa
  misc_feature: Ceres Promoter pOsMEA
gagagcagaacatagtagccgctgttttctgggggtgcaatttgtgcaagatcgctatccttatggaccatgcaagcaccaagcaatattaagccaggtccaacagcggtcttggggaattcagaaatgagcttaaaaacctccttgagctggccagctcagccaaggaggtccatcatgcatgtgcatgctcaatacttggaattattgcaaaatgatcggtcattgactggaagactttgcgcccttcctcagccaaccttatgtggctgcatgcatagagtaccaacaggaaggtagcgtttgttggaataaggtttgcatccagcatgtccttgtagagcttcaaagcctcagcaccttggcccatgaaggccatatccagctaattgcattccatgagaccacattcttgctatccatactgttgaagtgaagatgctccgagcttcggaaatgcttccacactatgcatacatgtcaatgagcactgtcatgacataaacattgggccccaagtcctcctcagcgataatcctatgcagccactttcccagggacaaagctccaagctgtgcacacgctgaaagagagctagaaatgatgattggatttggtcacacgctaagtaccagcatttgctcaaagagggcaattgccatctccgtccagccattctaggcataccctggtattattgctttccatgattccgattccgtggtcttctatggcatcgcattgaaggccttccttgcagactccatatcatttaacctacagtacaatatggtaattgctgtcgacactggagaattcgcagtaaatccagacttgagaggaccatgtaagcattgatcaagcagttcattcccaaacagactatacgggatcagtgccagtgctcgagtttggcttcaattccaaggccatcaacccaataaacagattaactgatgaaccaaccatgcaattcgccgagcaaacatagattaagcattgtaggcaaccaaatctggattctccatcaagtcaaagagacgccatgcagaattccacatccccgctgtatacaccgagatcaaccggtcagaacatgctcatactccgccaaccctctcttcagaacatgctcatactccgccaaccctctcttctctgcaagaggcatcctccccaattccccattgttatatctgttgctggtaagaccgttgccagcgtggttgtgtcagaccgaacagactctgcactcgccatcctcacgaacgactccagggcctccgaaccaggaagcccggccggccatcagcgtgttccacataacggtatccggcgactgcacagtgtcgaacaccttgcgtgcgtggtcacctctggacagcatgaagcgtacaggctacagcttggccaatgcggacgccacgaacgtgtcggcggcgtaacccgcgcgtgcagcgcgccgcgcgcgggctgcggagtcggttggagacgacacgccgccgccatgagagcaatgagcgaggtggcggcgaaggcgaaggagaagtagtcgaggcaagcggaagagaaggcggcagcggagaaagcgatcggggcggcggaggaggtgggtgggagggagggacgcgtagcggaggtcggaggaggagggagctgaggtttccggggcgggggtcgagagggtagtgtacggaggcgagggacacggcgaggatctggtcgaggtagcgcagtgtgaaggaaagcgcgatgaggcggagggcgccggcgaagagcggcgcggcggatagcgggaggaggcggcgccggcggggtctcatccgattggaaacagattgggaagggggagggggtaggaatacgtggcgtcggcagtattaggtagagagagaaaccctttccatcctttgtctcttagccccgaaggagagagaaaaatcagaaaaaaaaaaccctccgcgtgtgggggaagcagagctccggacgctggcgccgctcgcgccaccgcacccgcaccgcc

SEQ ID NO: 253 - DNA, 2034 bp, Oryza sativa
  misc_feature: Ceres Promoter pOsYp102
gaacgacccaaacgcgtaaatggtggtactggtttccctgctttgccgagtaccagcagccacgaagaacgttacacaatcgagtacaaaatctataagagcaagtttaatagcatagccaaatactacctctaaatcatctatagccaatttaatagttcatttattcaataattacttataaacatatactacaatcattaatatatggtcttacttcttatacacataatattttggagtccgtgttacagctggctataaatataagggattttggttggatgtggtacatcctattataatgaatctagacatgaaacctgtccaaattcatcgtgctaggatacgccacatctaaccaaaatctcttatctttagggatggagagagtaataattaaatgaagctaggtagagtttcccggtcaatacgcttgcgtgtgcttataagagcatggccaacagtttcccgatactcttcccaatatcagttttgaggagttttgttggaaaaaatcgctccaacagtagacctaaatcacccctaaaagcttggcgtttccaaacccgcatatttcgttctccacttgtagggaagagactcggcgcccaatccttcaaccgcatgcacttcgcgcgcgctgtgtgaaaattttcctaccaggttcttctttgtgcgttcgtctacctgtgagtcaatccatcacgccagcagcctcatcttccccgcagctgtctgggaaagcagccatggctcccccaagcttccccagcgtcgacatttttttctcagcggcagcgccagacccatctccaacccaattgggcggaccttcgtcggcgctcccccagcaccaccaccgactcgaatcggccgtcgcccctattcatctccaatcgtccctcgaccctaccgcatcctgcagcacagcctgtctctcgcgtcagactggcgctgcgctccccccggtaatgtgcaggcgacaaaggccccatgcgatgcgaccagcagccggcgacaaccggaggtgcccagtcgctggccttcatcgaatcatcgtgcacctcggtcggagtcgatttctgattgttgctgctgctcaaatctggagcttgctattgctgagaactgcttggtggtggtactggaaatttgttgtttgctggctgatgaaaactgttgttctttgctgctaaaaactgctgcttgctagtactgaaaagtactattgcagctgctgaaatatcttgctgcttgctgctgaaaacttcaagttgttaacaccgttcacactaaaaaagctgaaattttttttctgggctgaaaaccccattgttgatgattgcagaaccaatatttttccatgtaaaatacaggagatcgtggtaataatcaagtgaaatatcattttggggcaaatactcagatcgtacctgaagccaatggaaacattgttcaatgcttaaactgtcagttatgatgtcaaagagattgatcactgaatgtcctgaaaggagccgtgaggaggatgcagcattgcagcgtgcgcgagcgtgagtggaggagaggaatgacgattctgttggtagttgtcgatgtggcctactttttttgttttgaggattaaattttgggaatctcttggagataaaaggtattctcataccttaaatcctttttagagatctaaaaaaaatgatttaggggattgaattttgggtggctgttggtgatgctctaagttgcacatcctggggaaaaacctccctaatccatcagcaaaccgatcaaccacccacgacaagtcgacgccaccgttttttttttctccctcctaagtcctaaccccacaaaaatcccgcgaactttcgtctcaccacgcgccgcgtgccccctacaaataccaaacaacacccaccacgtccactcacaaaccacgcaggaaacctcagaaaatcaccgtacgcgacgcgggcccaagaaaaccccgacagaaaccgcgcagcagcaacaccaccaccggcgtcggag

SEQ ID NO: 254 - DNA, 1877 bp, Oryza sativa
  misc_feature: Ceres Promoter pOsYp285
ggcccgagttaaacgatcttccacgtgtcagcgaatcctagtcgttcgatgaatctgaatctgacttgtggtggttggacggccacgtgttaaaaaagggaaacgtccgcatcacccgatgctgggacatttgcaatttcgatccagctgtagattgaccagttgttactctcttttttttaacaccatacaaacgtaatactccctctgtcccaaaatataagtattttttttaacctcggttcagtcttcgaggtgctactttgaccaataatatttataaaaataagatgttttaaataaagagagttgcatattatgatagctcgtttaatgataaacaaagtaccatcaaatttacatgattaatctttttaatttatttgctattaatagttaaaatttaaaaagtttgacttcacactgttctaaaaatacttatattttgggacggagggagtacacattagagcaggtacaatagcagactagtagccagctataaacatattttaatgagataaaagatgagagagaacagcgggctacagatctgtagccagctgcagcacggactccaagacattgtgtgtgtatgacaggtgggaccatatattaatagtacagtaagtaactattgtatgaattggctattagattagctataggtgaattgtagctagtagtgggctatactattgaacttactcttatatctctcaatatctccagaaaactaggacgatatatattgatattaacaaagtcatcatagatatctcgctatcgacatatatattacctatcactgaaaaaataattaatcataaatgcaagcacatatactacgttcaacactgaatgtaggtagattggtagacgggttccaccgcaagaaaagcattgcaccagtgaagaaagaaacatcggaatttgtatgtagtttgttgtttgatgaattcttttgattaaaaaaaactaaaatcagagttgattcagttaatggtgttgcctacgatatacttccatatcatgatatcactgtagactatgaatcatatctttaattaaaactaaatcaagaaattaagtatgagacctcaactcaatgaagaatttctagttgaaaaacattcctagtgtgcgttcggatggaggtagggatcttctctccgttcatataaaaccggatggttcattagaacatgattaattaagcaacagttaatctaaaaataaattaatattttttaagaaatttttgtatagagatcttttgaaaaaaatacattggttagaaagcatactaataaaaagagaaaaataagaacatagtactatagtagaaaatgagaacttggagtatttgagaggatgggaaataagaagattaagaagatgcgtaaagtgaacggttaacgcatgattgattaattaaatattaattattttaaatttggaaaataaattagtatgatttttaagcaacatatatatatatatatatatatatatagaaaaacatagttttagaaaatataagcgtgtaaaacgatatgcaggaacgaaacgttgagcattcaaaatttcaaattgaacatatgaatcaagagagaataaaaaaagaggccttctaggctggcatggacaattggacatgttttcaactagggtttcaagcttcgagcatccacttttgtccttgcaaactttatacggcaaggcccgtgaatctagccccccacaccaccccacccgcccgcgccgcgcggccgcctcgcctcccctcccttctcctcctctccgcccccgccgccaggccgtccacctccgccgtctcctcccccattcgcacccaaggcgctggcgcggaaggc

SEQ ID NO: 255 - DNA, 1000 bp, Arabidopsis thaliana
  misc_feature: Ceres Promoter PT0565
caccaaatatagtgttatttcaatactaaaatggtgttatggttggagatgccctaaagataaacatgacgagacacgagatttattaatttcttgatcaaccataacttaataacttaatattaatttcacttaataatttccaattaagtgaatctttacttcaccaaaagttcctaacgaactcttattttctagcatcaatattaccatgaactagcatcaatactatcatgaaaaattcctacttcctatccaactcttaataacaatgctagtcttaacaatattcatcaaaaacttgatatagaccttctaacttagccacgactagtatcggtgaataccaaaattaatgtattcatgagaacttgagatttctctaatgtattcttgttactaaacaagtaacaacactcaagaaatatcatgatcaaatattttactcataaactccatatttcacattttgaaaattttaaacagcaaatcacattgaattttcgtggtaaaagtatttaaaattgaaaaatagcagctcctgatttcaatgtataaatttatctttatatggtttatgtctccaacttattttaaaaaagagagaaagagcacccaaaaggtgaccgtttgaaattcgaatttatttccgtttgaaattcgaattcaaaaaaagtaaaccgaaccgagtctcgttactgactgtcacacattgtttccctaaaagctaattaacccatacgtggcgtaatataacaggtcagtgatcaatactaaataacagacatacacctttaaaattcgtgcacgctccaaaacaaaatctacacttcaaaatcaacggtcacgatcattcctcaaatttcaaaaaattatttaacctcacttccttcgctttgtttttaaaacctctctctctttctctttctctttcgccattaaaactctgtttcctttttcagagattctcagagaagattcattttaccctaagaaaaaa

SEQ ID NO: 256 - DNA, 999 bp, Arabidopsis thaliana
  misc_feature: Ceres Promoter YP0015
ttgagccttattgttgttattgacttttagccaatagaaagagatggaaattcaataattatccacaaaattccaaatcattggtgtacaaaaagatctaaggctgttatattttcaaaaaagaaagaaaagaaatgcaacaaatatggattaaactgtggtttgtaaattgagctttgcatgaaaactttatcactatgatttcactactccatatttattgactaaagtggcactaatgaatttcttaatcatgaaatcttgtatcaaaaagtactaaaataaacatgacattggcaattaggaaaattctaaattagaaattagtaaaaatgaaaggtgaaagggaaagatgatgatatgaattggttggtgaccaggagaaatgtatcccgatttttgcagacactttcagtgtccccattcatataattatggcccacctcgttaagatttttcattcaccaccataacaagatctaagcttagatttcatgtaattaaacatataatatacttgccaatactatctaataaagtatacttaagcaaaaattattactctagtgtaaggcgatgaaatataagtttagttgaaaatttatgtcgatataacaaagtataatgaattaagaccttggttttcgattaacaaactaattaaacactagttttgcctaataaaaccgggaatcgtattcaaaaccgaacgacaaaacaagggacaagttgagagacaaaaccaaatcagcatctttcttccagaaatgtcatgaccacatgacgtcatcttgacccttcttcattgtgatatctgtggataaagcgcacgtgtttaattcacgaaccttcgtagtaacgaaaaatccacaactttcatattttttaattacccactaaactaaaacaaatttggaaaaacatgaaaaactttttctttttttccaggttcgtgaacctcgtaccctctatataaacctcttaaccaccttccacata

SEQ ID NO: 257 - DNA, 999 bp, Arabidopsis thaliana
  misc_feature: Ceres Promoter YP0087
tgaattgagtaaaatgtgttttcaaacagttaggtggtagaaggtaaaggtaataacatcatgatcttactaaaagaattgttgcatactaactatcaatattctcaacaacataatataatgtttttttaggtaattttccattttaattttttgtgattaaacaattaaacaactcgaatgatgatgataaaaaaaaaaaattaacaactcgaataagttaaagtagcaatacacatgtcgttcaattcaaccaataaagtaagacttatatttttaagaagttgactaatagcttaataagttggaaaacttgtgtagtttcttaattcccacgtgcagtaagaaataaaaatgaaaaaaattattatatccttcccactctgcgacttttcttttattttatcaaatattaaaaagattcatatcacagtttacacattgaaatcataaacgataattatgtattttgtaataaaaagttagttctgaagctcatactttggatagtcgctagtcgctaatatgctccttgtaataattaaagtcactacgacgcacgtcaaagccgatatttagggcttaattgatgcgtgtttttcttttcatataatagtaatataaattagtactaataaagtatgatggatggttgagacagaaaagaaaaaagatgactgtatggtcatcattacaaagaagaatgtattcttcatgttcttaagaataataaaatgtcacttgtaaatcaagttggtaagcattttgagaactttgttcgatgcaacgtatgatgatttatgtagacaaaagataaaaccgtatcttcaactattgccaagaaaagataaaacctaatctagtcagtctctcaacataaatacaacccaatagccaaactgtgtccaattcggagagaaactaaactaaaacaaaacacaaaagcccaacataagcccaataaaacccattttataaacagaacattactaacactca

SEQ ID NO: 258 - DNA, 1000 bp, Arabidopsis thaliana
  misc_feature: Ceres Promoter YP0093
atgatgaacattctacatatataattattatgtttaagcacttagacagcataaattctttctaattatataaatctaaccttgttacattgtacatctataaattacttgaagaaataacgagttctatttctttttaaaaattaaaaatactataccatatctcagtgattaagttgaaccaaaaggtacggaggagaaacaagcatttgattcttccttattttattttattcatctctcactaatgatggtggagaaaaaaagaaaatacctaacaaacaaatatatattgtcatacaaaaatatttctatatttttagttaattagtttatattcctcacttttcagggcttatataagaaagtgagcaaacacaaatcaaaatgcagcagcaaatactatcatcacccatctccttagttctattttataattcctcttctttttgttcatagctttgtaattatagtcttatttctctttaaggctcaataagaggaggtactattactacacttctctctacttttacttgtattttagcattaaaatcctaaaatccgttttaaattcaaaaataaacttagagatgtttaatctcgattcggtttttcggctttaggagaataattatatgaaattagtatggatatctttactagtttccattcaaatgattctgatttcaatctaatactctcactctttaattaaactatatgtagtgtaatttcacactgttaaatttctaccatgtcatgtatattagagttgcatagaaaattgtaaaacatccatttgaattcgaatgaaacaaaatgttttaaaataaaattttggtttttaaaagaaaaatctaaaactgaattatatcgtttaaccaagttgtaaaagtcataaaacgtagtatcttgtaaatcgctcttccacggtccaaatagacttctagtaataaacaagtaaaactaattttggtttcttactaattttcacaga

SEQ ID NO: 259 - DNA, 999 bp, Arabidopsis thaliana
  misc_feature: Ceres Promoter YP0108
ttagctgaaccaggaaattgatctcttataccagtttccgggtttagattggtttgatggcgatttgattaaacccccgaaattttatgtcgtagttgtgcatagtattattattctttgcggacaatagacgtatcgggaccaagttctgtagcaaaattgtataagcttaagtttgatgaaatttaaaggtaatcactaaaacccaaatgggacaataaaccggtgaagatttagagtttttaattttgactcatgaatctggagaaagagccctcgttaaaaggagtgaatcaatccataggggaaaaagttttgtctttttaaaaactaaagaaccaaaccttaatagaagcagctcaatgtgtgacaactttccactggcactaagataaagtgactagcgatgagtgcaattattgaaatagtagatggtaaatattacatacaagagtaaaaatatctttatgtcaatgcttaattcagtgtttctggttaacaagagaaacttctctaactttcgtaattgggtcttataaaattttatgcaattatgattttacccttttactacttttcattagctttcacgaatctattttgacaagagaaatcattagaggtaaacatgctttttggtcaagggccttaacagttccaccaatcaagctcaaaagttgtacttaaccgacatcttctgtgaaaacatataattacatgtacaaatcaaaactaccttatgaaataaatagaaatattgcagttcatttctaatttaacctcttcaacttttaaaactatttacatttctttatgtcatttctagtcattttgatgcaaattgtaccatttatggattatcttcacaaatttttaagttggtgaaaactttttggtgggtagttaaaacttgaaatagaaatttactttaccaaaataaactaatgaaaagtaatcactccactccctataataagatttccaacgttcccactaagc

SEQ ID NO: 260 - DNA, 999 bp, Arabidopsis thaliana
  misc_feature: Ceres Promoter YP0022
tagttccattacaatttccaaatgatttgttacaaagctacaagattattcgaaataggatttcatccataagagagaatggtgtggtcgacgctacaatgttgatttattggttgtggtttgcatcttggggatgtcaaatcctaagtttcaagttcttgtaaaaacgttttcaggtttctttaatatattttaatattaatgtaaaaagaaaagatatagcttttgtacaaaaaaatttgtttaatcactatgtaggaggatgcgatcaaattcatggaatgatgtattattagcttttctatcctcactctaaaaacaatactatagtgagttaaataatttgatcatttcaatgtagattaaaattttattaaaagaagaaaaatttaaaagcctataacaaaataaaaaaggaggctcgaggtatgatgggtgtagcagaagagctggcaacagctatcgactgagtgattacgaactcagtactcagtgttctcagctcacacactctttttttgttctctttcttttggacagctttcattttctcttttcttttttctattttgtttcaaaattccatccatattaaaataggcctgatcatgagaataaaggaaatactaatgatgagtttctcaataatgcaataagatgcaattattatgagctatttactattgaaaatgagcaaataaatgtcaaaacacaatctggttaagttagagcaactccattgtataggattcatgtagtttctaagaaaacaaaatgtattaatattttacttttacatccaaaaaaccaacttatatgagtaatagaaacgatcctaatattaggaattttagagattttctctcatctgtttcttaacttttcaatatttttattttttaaaattgtatgagtttctactaagaaactactgctggagttggtcttagcttcccaatgcttctccacctatatatatgcatatctccttcttaaaac

SEQ ID NO: 261 - DNA, 999 bp, Arabidopsis thaliana
  misc_feature: Ceres Promoter YP0080
aagcggcaatttagtaagaagtactcaaagtatcatttaccaaaagtatatggttttgggaagagttgttagggatgtattctttctaaacagatgatatgacgatgttcttgaaaactaatgttaaagacggaatctctggcatcttcactcgggagatatattaaaccgttgattgtagttagccatgtacttagcttagtgcacaaataatctgctgcaagaaatctttttctattataatatctctcatttaaacattagaacatattgtttaacttgttcttctagaaataaaactgctaatttcttatggtaaactattttcctttagattgcacaatcgaactcgaaaatctagtggagactatgtgactatgtttatatatatgaaacctaaatcaaattatcccaataattgggagacacaaaagaaaaattacgaaagaaaacaggaaatcaaatcaaaagataaagagaaggtaaaaaaaggcaagaagcactaatgtttaatatttatagttttctccattaaagaaaaagcgatgatgtgtgttctcatcttttgtgaaagtatatatattgcttttgcttttctcaaaagcaaaagactcatccaacaagaacaaaaaaaaaaactaaagctcaatccaaaagacgaagaatgcattggatactacaacttctttttcacttttctttcaaatttacaattatgattttcacaatacagtttattcaaaaataaataaaaaaacgaggcatgaaaataatgattatcctcttcacttattaagccactcactataagcagagcaactccagaacatagtgagcccccaaaacattaaagcatgatgatgtctaatgatgatgatcttcttcgttccatttctctaaatttttgggatttctgcgaagacccttcttctctttctcttctctgaacttcaagattcgtgtcggacaaatttttgtttttatttttctgatgttaca

SEQ ID NO: 262 - DNA, 1000 bp, Arabidopsis thaliana
  misc_feature: Ceres Promoter YP0388
agaagtattcacgcaccaaggttatatttgtagtgacatattctacaattatcacatttttctcttatgtttcgtagtcgcagatggtcaattttttctataataatttgtccttgaacacaccaaactttagaaacgatgatatataccgtattgtcacgctcacaatgaaacaaacgcgatgaatcgtcatcaccagctaaaagcctaaaacaccatcttagttttcactcagataaaaagattatttgtttccaacctttctattgaattgattagcagtgatgacgtaattagtgatagtttatagtaaaacaaatggaagtggtaataaatttacacaacaaaatatggtaagaatctataaaataagaggttaagagatctcatgttatattaaatgattgaaagaaaaacaaactattggttgatttccatatgtaatagtaagttgtgatgaaagtgatgacgtaattagttgtatttatagtaaaacaaattaaaatggtaaggtaaatttccacaacaaaacttggtaaaaatcttaaaaaaaaaaaaagaggtttagagatcgcatgcgtgtcatcaaaggttctttttcactttaggtctgagtagtgttagactttgattggtgcacgtaagtgtttcgtatcgcgatttaggagaagtacgttttacacgtggacacaatcaacggtcaagatttcgtcgtccagatagaggagcgatacgtcacgccattcaacaatctcctcttcttcattccttcattttgattttgagttttgatctgcccgttcaaaagtctcggtcatctgcccgtaaatataaagatgattatatttatttatatcttctggtgaaagaagctaatataaagcttccatggctaatcttgtttaagcttctcttcttcttctctctcctgtgtctcgttcactagttttttttcgggggagagtgatggagtgtgtttgttgaatagttttgacgatca

SEQ ID NO: 263 - DNA, 283 bp, Arabidopsis thaliana
  misc_feature: Ceres Promoter PD0901
caaagtatttgacaagccatatggttttggatcaaaaagtcggtccaaaattaatgttttatgtgcaagaaccgacccattgtacacacgtgttaacatcttcaagactttcatctctatttttcttttggtcattaagatacccattgatccgaatctgttacattcccacctacttttttaatttttactatccactccaaattaaacacaaccgatgattttaataattggaagctttttaaaatatttctccacgtgcctctttgtgtttgtctatata

SEQ ID NO: 264 - DNA, 1000 bp, Arabidopsis thaliana
  misc_feature: Ceres Promoter PT0623
aaagttattgacattttgaaaggaccgtaaatattaccaaaaaactgacggagttaggatcggccacgtagaaagggacaaagagagaacagtcacggactcggccagactaagtatgggcctgtctgaatccaaactcagctaagttccaaaagcataaagagagatgtgtaatgaaatgaacgtattctagaaacgaaagcaatgttatgctttgtttttgagccacatgtttttgggagatggagagaatcttttttacgtttttaacctaacccacttggcacttggccaaaaaagtgagaagaaactgtggcgaatgagtaggccacgccatggactttgttccttgtccttcaaaagttaaatttatgttatgcgtggggacaatctaagcaacgtggttcctttaaatatcgcagcttcctcttttacacttttggagcctacgtgttttgttttggaccggccaaatacacgagtcagtcagtttagaaataatttggatgtccaaaaatcttggagatccaaataaaataattagcatgttttagttcataagaatatgaaatgtagataaactgtctatattaatttttccatagaattggctttttatcgaggtgatgtacttaatgactttgttgattactactcgtataacaataaagaatatgatactatgtgagacttataatgaatttggtgtgtgttaattaatccagttgaaacagtttaataacaaatcagaataaaaattgtagtaagaaaatttgaacgctgatccttcaacctagatagtgaacctttcaaatactatatgattcacgtgtaatgtttttgaccgttggttatttttgtgtgaactatattaacttatcaatatcgaaaggctaaataagtaaataactaaaagaaagttcaggaaacaactcgacctaatgacctatcatttctgatcacccgtcctataaatacatacgtaagatcattcgttact

SEQ ID NO: 265 - DNA, 1247 bp, Brassica napus
  misc_feature: Ceres CLONE ID no. 1301219
  misc_feature: Ceres CDNA ID no. 24453363
  misc_feature: The sequence encodes the protein given in SEQ ID NO 89
aaatcaaaacaaaactcttcaacgtctacacttaccataaaaactcgaaatcgataccaaaaataaacaaacaacgacagcatggataagacaacgacactgcttttgttcttcttcttgttcacattcctcacgacttctttctctaaaaacctatgtaaccaagatgacaaaaccaccctcctcaagatcaagaaagccctaaacaacccttaccacctcgcctcgtgggaccctcgaacagactgttgctcctggtactgcctcgagtgcggcgacgccaccgttaaccaccgcgtcaccgccctaaccatattttccggtcagatctccggtcagatcccgccagaggttggtgacttgtcgtatctacagacccttgtcttccgcaaactcactaacctcaccggtcagatcccacgcaccatcgccaagctcaagtatctccggagcctcaggctcagctggacgaatctgaccggtccagttcctggttttctcagtgagctcaagaatctccagtgggtagacctttccttcaatgatctctctggttcaataccgagttctctgtctttgttacctaatcttgtgtcccttgatctcagcaggaacaagcttacaggttctataccagagtcatttgggtcgtttccagcaaaagtacctgatctttacctatcacacaaccagctctccggttatataccaaaaacactaggcaatcttgattttagcaagatagatttctctcggaacaagctcggaggcgatgcttcgatgttgtttagagccaacaaaacgacgtggtacattgatttatcaagaaacatgttacagttcgatctctctagagttgtgatccctaagacacttggtatcttggacttgaaccacaacggaatcacagggaatatcccggttcagtggaccgaagctcctcttcagttcttcaatgttagctataacagattgtgtggacacatccccacaggagggacacttcaggaattcgatacttattcctattttcacaacaagtgtttgtgtggtgcacctcttgatagttgcaagtaaaagattcaagcagccaagctattattattatacttctacaaataatccaataagtctataaacaactgtatctttatttggattgattaataaaaataatcaaccaaacttgctttgataaatttgttgtataatcttcaaaactttttgttaatcaaccaaacttgttt

SEQ ID NO: 266 - DNA, 1062 bp, Zea mays subsp. mays
  misc_feature: Ceres CLONE ID no. 1411115
  misc_feature: The sequence encodes the protein given in SEQ ID NO 90
attcaaaacaaaacaccatacaacatggatcataagacaaacacgacactgcttttctcgctcttgttttccatcacgtacctcatcaccatcgcgacatcgaaagatctatgtaaccaaaacgacaaaaacaccctccttaaaatcaagaagtccctaaacaacccttaccacctcgcctcgtggcacccggaaaccgactgctgctcctggtactgcctcgaatgcggcgacgccaccgttaaccaccgcgtcatctccctaaccatattcgccggtcagatatccggtcagattccgcctgaagtgggtgacttaccgtatcttcagaatcttatgttccacaggatcactaacatcaccggtcagatcccatccaccatcaccaagcttaagtatctccgttctctcaggcttagctggttgaacctcaccggcccggttcctgatttccttagtcagctcatgaatcttgaatacttaagccttgccttcaatcagctctctggttccatacctagctctctcgctttgttacctaaactttcgtacattgatgttagtaggaataaacttacaggtacaatacctgaatcatttggatcgtttccagcagaagttcctcaccttatcttttcacacaatcagctctccggttctatacccaaatcactaggcaaccttgattttaaccggatagatttctcaaggaacaagctcacaggcgatgcttcgatgttgtttggagccaacaaaacgacgttttccattgacttatcaagaaacatgttccagtttgatctgtccagagttgtgctccatgagtcacttggtgtactggacttgaaccacaatgggatcacagggagtattccggttcagtggactgaatattctctccaaatcttaaatgttagctataacagactgtgtggacccatccccactggaggaagtcttcagagatttgattcttatacatattttcataacaagtgtttatgtggtgcacctcttgatagtagttgcaagtaataaaccaagcttatctctagttttccc

SEQ ID NO: 267 - DNA, 1151 bp, Triticum aestivum
  misc_feature: Ceres CLONE ID no. 784385
  misc_feature: The sequence encodes the protein given in SEQ ID NO 143
atcacatcaaagccacacacacacagccgacaggatgaggatgcgctcacgcgctctgctcgtcctcctcctctgctctctcctcgccggcgcggccaacgccgagccctccccggacccgacgtacaaggactgccacccaggcgacaaggcggcgctgctcgccgtcaaggccgccctcggggaggcctaccacttcgcgtcctggacgcccgacagcccctgctgcgactggtacgacgtcacctgcgaccacttcaccggccgcgtcgtcggcctcgccgtcttccaggacgccaacctcacgggcaccatccccagcgccctcgccggcctcccccacctgcaggacctcaccctgcgccacctcccggcgctctcgggccccataccgccggccatcggcaagctctccaacctctccagcctccgcatctcctggacggccgtgtcgggccccgtgccgtccttcctgggcgcgctcaagaagctcaccttcctcgagctctccttcaactcgctcagcggcgccattccggcgtcgctggggaccatctccaacctgtccggcatcaacctcagccgcaaccgcctcaccggcgccatccccccgatgttcctcagcaagtttgcggaccaggtctacctctggctgtcgcacaacaacctcacgggaccagtcccggccgggttcgcctccgtgaactttgcgcacctcgacctgtcgcggaacgacctgaccggcgacgcgtcgggcctcttcggccgcgggaaggagttgcagtacatcgacctgtcccgcaacgccttcgatttcgatctctcaggcgtggtgctcccggagcagctctacttcgtcgacgtgagccacaatgccatccatggcagcatcccggcgcaggtcgccaacttgtccaatctgcagttcttcaacgtcagctacaacaagctctgcggccctgtgccgaccggcgggaacatggcgaggttcgatctctacaactttcagcacaacaagtgcctctgtggtgctcccctccctgcatgcaagaaatagatgaaacattatccggtgggttttgtgtcgatcaattcgactaatgtctctctggattgagagttgtgctgaaataaagtcaagatggttatgc

SEQ ID NO: 268 - DNA, 794 bp, Brassica napus
  misc_feature: Ceres CLONE ID no. 948978
  misc_feature: The sequence encodes the protein given in SEQ ID NO 149
attttttatttccttctcttgacttctctagatcgcttcgtgtgccctgtctgtctcaacttccctcaaccatcaggcaataataactcaagtaatttcgagatgggccccggagatagtgaagcagtggaatgcaagtgtggtatgcctctttgcatctgtgttgttgctccacccaaaacctctaacccacaggctacacgggctcctcctatggctcttcctcagtcagatcccaaaccaaagtctgacacttcagctaaaagtaaaggttccacttccagcaccaatgctagaccagacaagccccaaaaagactatgaagtcactggggagggattaagagaagcaattaagaatggtgacactgctggtgtgaaaaagcttctgagtgagggcgtggacgcaaattaccatgacaagcagggaatgtcagtgcttcatctggcggttctgttcaaccaaactgatattgcgttgatgttaatggaacatggagccagccttgactacaaaaatgcacaaggagaaacaccactagattgtgctcctgcaacactgcaatataagatgcgggaaaagatgaagtcgacttagtatgaattgaattcaaggcagagttacaaatctttcctcaaaagtctgtaaagggcaaatcaagggtcatgaatttgcttgtaagacatcaatattgacattctgtatgcaatttctcgtcttgtgtgaactttgaaacgtcggcttcttccactcttgtaagtcttctctatgtgttatccgctgtcactgttgtc

SEQ ID NO: 269 - DNA, 1227 bp, Glycine max
  misc_feature: Ceres CLONE ID no. 524650
  misc_feature: The sequence encodes the protein given in SEQ ID NO 156
aaatgctttgtggataccttatccactcttgtgyatttcccttattttttctttaatataatttttacctttctgtaaaaaaactctgcccttatatggagagcctatatttattttgaaatcttgcaattgaaacctcttttgagttttgacatttatggatgaaagataccttgtgtcatctaataaattgcagttgttaatggttcaacagctcatgaaagattgactcatggaccctgaaggcaaaaagtttggaggaggaccaagggaattgactggtgctgtggatcttataagtcatttcaaattactgscccactatgagtttttctgcaagaggcctctccctgtgtcaatcgcggacacacactaccttcacaatgttgtaggagacacagaaataagaaaaggagatgggatgcaattggatcaacttattcagaatacatctttcagagatacaaatgctcgtatacagccttttgacctagatgttctcaaggaagcttttcaattacgggaaacagctcccattgatttgcctgctgcasagaaagggattccaactattgcaggaaaatcaaaaagtgagaataaagacaaggagaagaagcataaaaagcacaaagacaaggacaaggataaggatagggagcacaagaagcacaagcatcgtcataaagaccgtagcaaagacaaggacaaggataaggacagggacaaaaagaaagataaaagcggacatcgtgattccagtgctgatcactcaaagaaacaccatgaaaagaaacggaagcatgatggagacgatgatgttaatgatgtgcacaaacacaaaaagagcaagcataagagctcaaagattgatgaattgggggcaattaaggttgcaggctgaaatggtttcgtacagtagytcacttcttttcctcaattggttgttgtcatttgttaaaatttagaggggtctttcaattgacattatcaaatttcttgaggagggtagctagtgatctgactaaagattatcaagatggtgaattcacctgatgaaggaaaaggatgcaggtaaaattggatgaagataaaacttttttttcccttttgtacaataacaattaccttataggattgccagtaatttgcaaaactttggtcttcttccttttcccagtcttttggagcactggatatctcaacatgtatactttattttggtctttt

SEQ ID NO: 270 - DNA, 1556 bp, Zea mays subsp. mays
  misc_feature: Ceres CLONE ID no. 237720
  misc_feature: The sequence encodes the protein given in SEQ ID NO 157
aagctataggcgaaacttcgggggtcgtcgagggttctcgaccctcccttcccctctctcgcccgctcgctccctcaccgccggcgttctcgccgccagctacggacggggcacactgcgcagggtcccagccccgcctctcacccgaacgtcttcgctcccctcaccgggtaggcgtcgcgctctactggcaccaccccggccctcgcgctctactggcaccggaccggcgcggggtggcgcggagacctgtcccggccaggagaccgttccgtgctataccggtgaagatgctctttgcatagctcaagctccaaactgatggattctgatgacaagaagtttggaaatgggccaagggagcttactggtgctgttgatttgattaaccactacaaactgctgccacaccatgatttcttttgcaagaaacctttgccactggcaatatcagatacacattatcttcacaatattgtgggagacactgaaattcgaaaaggagaaggaatggagttagatcaacttgttcagaatgcatatatgagggataaacctgcttatattcagcccttcgatatggaaacactggggcaagcgttccaacttcgagaaacagctcctgtggttttgccctctactgaaaagggtataccgactatttcgggtaaaccaaaaagcgagtccaaggacaaagagaagaagcataaaaagcacaaagacagagagagggacaaagacaaggaacataagaagcacaaacatcggcataaggatcgaagtaaggacaaagataaagacaaagacaaggataagaaaaaagataagagtggtcatcatgattctgattcaaagaaacatcatgaaaagaagaggaagcacgagggaactgaagattcagcagatgtgcataagcacaagaagagtaagcacaagagttccaaaaccgatgagatggggaatggacttattagttaacacttcctagttctagcttcaatccttgtaatttgctgttaaaaggagactgatggtctctgccatcaaaaccctgtgcagaatagtgatgacaacataagttggagatcttgataagaacgcgataaagaagtatttttgcagagtccattccgaggaaaattaaattacttaatacaggactaatccttcgaactgtgcaaccttctgttcctccctgacgaattggttgtaggagcggttgaaaggatatgccatgagattgtttcgattgcagggccagcgcacttattgatactaggcttcttatttaactcctaatttcggatgtagcgtgcatgagtatcctgttgagtagctgtggatggttttacagttggtctagagatgtagttgagggcagggaattggaaagaatttcgtgttcccgtcgtactgaccttggttgatagagagtttaaccagtagctaaattaaatgttgctagtcagttccaagtttattctgcgtggaatgaattggagtcaaattagcacactgcttatttaaccatgataaagatcttgttattacaaagt

SEQ ID NO: 271 - DNA, 1410 bp, Zea mays subsp. mays
  misc_feature: Ceres CLONE ID no. 465517
  misc_feature: The sequence encodes the protein given in SEQ ID NO 158
accgctacccaaccgccgccgcggttctcgctgccagcgacggacgggccacaccgcgcaggggctcagccccgccacccaccttaaccccgccgtcgggaggcgtcgtccccggcccggcccggcccggccctcgccctctactgcaactggactggcgcgtagacctgtccccgccacgagatcgttccgccctatgtcggtgaagatgctctttgcatagctcaagctgcaatctgatggactctgatgacaagaagtttggaaatggaccaagggagctcactggtgctgttgatttgatcagccactacaaactgctgccacaccatgatttcttttgcaagaaacctttgccgctggcaatatcagatacacattatcttcacaatgttgtgggagacactgaaattcgcaaaggagaaggaatggagttagatcaacttgttcataatgcatatctgagggataaacctgcttatattcagccctttgatatggaaactctggggcaagcgttccaacttcgagaaacagctcttgtggatttgccttctactgaaaaaggtataccgactatttcgggtaaaccaaaaagtgagtccaaggacaaagagaagaagcataaaaggcacaaagacaaagacaaggaacataagaagcacaaacatcggcataaggatcggagtaaggacaaagataaagacaaagacaaggataagaaaaaagataaaagtggccatcatgaaaagaagaggaagcatgagggaacagaagattcagtagatgtgcataagcacaagaagagtaagcacaagagctccaaaaccgatgagatggggaatggagttagttaacacttcctagctctacctccaatccttgtaatttgctgttaaaacttaaaaggagacagacggtctctgctatcaaaaccctgtgcagaatagtgggtatcatgaatgggagctcttatttttgcagagtccattgtgaagagaattgaatttgttaatataggtctaatccttccaactgtgcaaatcaactgtgttcctccctgaagcattggttgtagggtgcgcttgaaaggatgtgcaatgagattgtttcgatgtaacgtgcatgagtacactgagtagctgtggatggttatacagtttgtggtctagggatgtgcagtgagggcagggaattgggaataatttcgtgcccccatcgaccttgatttgtagggtaggatgatttactgtttaaccactagcaaatgttagtagccagttccatgttcatttactccacggcaactgtgctttcgtgtgccaataaccggagttgatccacatgtaatgaattggtgtcaaattgacgatcctgtgtttcaaagtatggttattggatcgtgttgcc

SEQ ID NO: 272 - DNA, 1468 bp, Triticum aestivum
  misc_feature: Ceres CLONE ID no. 703914
  misc_feature: The sequence encodes the protein given in SEQ ID NO 159
atagtttccttcctcttctgacttatctcacatgctctgacctcagctccaatctgagaccctagtccctcgagccgtcgccgtgccgtagctgatagcatcaccgtccgacgccccccacccgctcccaaccctcccgcctctcacgcgcgccgcccccatcgccgtccccgccgtatccactccgtccgcagtcgacgggttttgaggtggacatgcattttgcaaatgtcaggctctaatcagatggcttcggatggtaaatttggaaaaggtcctcgggagctcactggggctgttgatttaattagccgctacaggctgctgaaccatcacagtttcttttgtaagaaaccattgccactggctatctcagatacacattatcttcagaatgttgtgggtgatactgaaatccgtaaaggagaagggatggagatagatcaactcattcagaatccagatctgagggagaagaagactgcttatattcagccttttgacatggaaacactaggacacgcatttcagttgcgagaaacagcgccagtagatctgccttcggctgaaaaaggcactccaactatatcgggaaaatcaaaggttaagtccagggacaaagtgaagaagcataaaaagcacaaggagaaagacaaggacaaggaacacaagaagcacaaacatcgccataaggatcggagtaaagataaagacaaagacaaagagaaagagaaagagaaagaaaaagagaaggagaaggagaaagacaaagacaaagacaaagaaaagaaaaaagagaagagcgtgcatcatgatttgggaggtgataattccaaaaaacatcatgagaagaagaggaaacatgatggaatggaaaatttggcggctgtacgtaaccacaaaaaaacacaaaagcgcaaaattcaatgaaatgggcagtggactttgtttggcgtaagatgtgacaaattcgtttccgtgttagttctcgtaatatgactccatgttttatgctgttaatgggcgactctgaaggttttcttgtcaataccacttccgatggagttactgatggaatttcctttatcaagatgatccggttacaagggacgcgcccaatcagatcatgatacaccgtaaatcaattctgggaaaacttgaacttgtcatttggagttatttgattttttttgtgtgtgtgtgtgttagttctgtgcccattagcaattcttgagtgttgccctcctatatgccctgtcctgtaactcagacagaagaaaagggtttactgtcaaagccgcatgatgtgaccgtgtacaacaggagacgtcacgtgtagaagagaaaaattagccgtacacattccatgatccagcaaattcaatggtggtgatgaaccttaaggaactcgagcagtatgttctgtgtaccaatcatgttttcttaatcaaacaatcccagtttaaac

SEQ ID NO: 273 - DNA, 858 bp, Brassica napus
  misc_feature: Ceres CLONE ID no. 952316
  misc_feature: The sequence encodes the protein given in SEQ ID NO 163
gaagttgattaggaacccaccgctgaaaacgaatccgtcgtgttatcccgtgagctctccgccgcacaatctcagctcagaaccgtagaaaacttatttgcttcataaattgtaggattgcctcctagaccaatcggtgctccctctgcgtttaaaatcgaggggtggtgtgaaatggaagatggagagaatgatgggaagagactagtgtttgtgacggttggaacaacgagtttcgatgccctcgtgaaagcagtggtcagtgaaaatgttaaagaggagttgcacaagagaggatatactcatcttctcattcagatgggtcgaggaatctactctccacccaagtgtgatggagcggatggatcgctagccgttgattacttcaccttctcttcgagtatcgctgattatattcgatcagcatcacttgttattagtcacgctggatctggaagcatattcgagacgctgaagctagggaaaccgttgattgttgtagtcaacgaagatctcatggacaatcatcagtgtgaattagctgaagagcttgaagagaggaagcatttgtactgcgctcgccctcacacgcttcatcagaccttgacgaagatggagttggagtytctggttcggtacactccaggtgacggaacacctgttgcccgcattatcgacaggttcctggggttccctgatgattaaacagatgcatttagaaacaagtgttctgagaacagttttaactaattatgtactaaacaggtggtctcttcacattggactttgtttcgtagattcatatctttgtaatagcaaaagctttttctgatgcttgagatgattatggatagtttc

SEQ ID NO: 274 - DNA, 925 bp, Glycine max
  misc_feature: Ceres CLONE ID no. 649261
  misc_feature: The sequence encodes the protein given in SEQ ID NO 164
aaaattgggctgcaccagttaactgaaacattgagcatttcgaaatccccatagcttcaccgccaatttgggagccgctatagatcggcttcacacacggcggcgctccgattctccgacacactgtcgctcaccgcttcactctctcacaaattgaccgaatcatcgctagttgctgtctctggtgtcactacaagggagggaagactataattgaattgaatcgagtgggtgttgctaaatggggaacgatgaaggcaatgataagaaaaagagagtggtttttgtgactgtagggacaacctgtttcgatgctcttgtgagagctgtggattccaacaatgttaaacaagccttgtttgcaaaaggctacacccaccttctcatccaaatgggtcgtggatcctatcttcctactaagtctgaaggagatggttctttggctgtagactacttcactttttcatccagtattgcagatcatctcagatcagcttctcttgtcattagccatgcagggtcgggtagcatatttgagacattgcagctgggcaaacctttaattgtggttgtaaatgaagatttgatggataatcatcaaagtgagttagcagaagaacttgctgatagaaaacatctgtattgtgctagtcctcaaacactccatcaaactatagcaaatatggatttaagttctctctttccttactctccaggtgatgctacaccagtggccaagcatataaacaatctccttggttttcctgatgattgatctaaagcctttttctcccctctatctctagggttaaaagtctttgtgagggatgataatcattttatgtaatatttggatcccctaaatattcagtcttaaatgttgaattgaatatcatgtcgatgcaagcaatatatatacaggatt

SEQ ID NO: 275 - DNA, 1062 bp, Zea mays subsp. mays
  misc_feature: Ceres CLONE ID no. 234461
  misc_feature: The sequence encodes the protein given in SEQ ID NO 169
gaaactcgaaagggacaaagcagcgagcggcgccgggctccccctcccttcctcgcccctgatctacgccgatcgaaggccgggcggcgatgctttcttgcctgcacctctcggtccaacacacagattagatcagcgttgaagacgtccgctgctgctccctgtggctgcggttttgcagcataagaaatatagctacacacagctcaatgcttgtcaggatcgatggcagatagggagcatcgaacagtatttgtcacggtggggacgacatgctttgatgctcttgtcatggcggtagattctccagaagtgaagaaggctttattgcaaaaaggttatagtaatcttcttattcagatgggccgaggaacatatgttccattgaaggtctcaggagatgctacccttcaagttgatcatttcacattttcaccaagcatcgctgacaatatgagaacagcttccctagttatcagccatgcaggttcaggaagcatatttgagacactgcgactcggcaaaccactaatcgttgttgtaaatgaagatttgatggacaatcaccagagtgaattagcagaagaattggctgaaaggaagcatctcttctgtgcacgcccacaaacattgggagagaccatccgggcaatggacctagagacactggttccttatgagccaggggatgccaaaccagtcgtcaccctgatcaacagatttcttggatttccagttgactgacgaataaatgacgatgtctccgttagggcctatccggttgttcttcaatccatgtggatttgcattcggatggcttttaagtctatattggtgccaaattgttgcggaaggcttcctgctcttgaattttacaaccggatttgaatcagatgtgtttgtagcagtatttgaaggaggaactttcttcaaggattatgttgttttattgcctaatatatagtgctattgcgacttcattatgtactttgtggatgtgtactgggtttcatgtacctaaatatccttattttgactagttgtctgttacttggtcttatc

SEQ ID NO: 276 - DNA, 922 bp, Zea mays subsp. mays
  misc_feature: Ceres CLONE ID no. 217678
  misc_feature: The sequence encodes the protein given in SEQ ID NO 170
atcaaagaccaaaccgaagctggcaaatgtaccaatcctcctcctccgatcactgttctccttcctcctctccgctccgttgccgacggccctgcgcccccgccccggctccccgccgtgccctgcgcctccgccgcgcccttacctccacacctcaaatctgctttgtagcataagctcgctgcttgttagggtcgatggcagagagggagcatcgaacagtatttgtcacggtggggaccacgtgctttgatgcccttgtcatggccgtagattctccggaagtgaagaaggctttactgcaaaaaggttacagtaatcttctcattcaaatgggccgaggaacatatgttccatccaaggtctcaggagatgctacccttcaagttgaccatttcacattttcaccaagcatcgctgacaatatgagaacagcttccttagttatcagccatgcaggttcaggaagcatatttgagacgctgcggctgggcaaaccgcttatcgtcgttgtaaacgaggatctgatggacaatcaccagagcgaactagcagaagaattggctgaaaggaagcacctcttctgcgcacgcccacaaacactgggagagaccatccgggcaatggacctggagacgctggttccttacgagccaggggatgccaagccagtcgtcgccctgatcaacaggtttcttggcttcccagttgcctgacaaataaacgacgagatacctccattaaggcgtcagttcctgtacctgtttgatgtaaaatggattaactggcatatggaaacagcaagactgtcctcgatcgttgcagttgggtttaattggggtggggggcgtcgattcgttgttcttgtcatgcccttgacacgagaaggcaatactgtgtggttggacggcatcactgaagc

SEQ ID NO: 277 - DNA, 891 bp, Triticum aestivum
  misc_feature: Ceres CLONE ID no. 1327188
  misc_feature: The sequence encodes the protein given in SEQ ID NO 171
tctgttctgttcagttcattcagaacgacgcacgccgccccgcttccttcgctcgctcggaccgcccctccgcccgccgccggagctccaccctcccaccccgcccgccggtcctcctcccgcccccgcaggtcctctaccgcgcgatcccgtcccgtcccgccctgccttccgctcgaccccagctcggcctcgtccacgaatcgagggagggaggttcctctcagagcttactcttcagaaggaatgggagatagagaaaggcgagtggtgtttgtcacagtagggacgacatgtttcgatgctcttgtcaaagtggtagattctgaggaactcaaacaagcactactgcagaaaggttacacagaccttctgattcaaatgggccgaggaacatacaagccatccaaggcctcaggaaattcaagtcttcaagttgagcatttcactttttcaccaagcatagctgacaacatacgggaagcatccttagtcatcagtcatgcaggttctggcagcatatttgagacgctgcgactgggcaaacctcttatcgtggttgtgaatgaagacctgatggacaatcaccaaagcgagctagcagaggaactggccgagaggaatcaccttttctgtgcccatccacagacgttgcgggagaacgtcgaggcgatggatctgaacgcgctccagccttacgtgccaggagaggccaagccagttgtggcactgataaacagatttcttggttttcccgttgattgatagtgcgtgttttctcttcatggagcaatcatttattcagctttgaaaggcctgtaagatgtgagcaaagatttcaagaatgtacagatttacaccgttttatggcgagatgattttctgggtttg

SEQ ID NO: 278 - DNA, 615 bp, Zea mays subsp. mays
  misc_feature: Ceres CLONE ID no. 1369396
  misc_feature: The sequence encodes the protein given in SEQ ID NO 176
aaaagttgggagaagaatcgaagatgggagattcgaggtcatttgcggatggattcaaggggttctgggaggagaggttgtcgttcctggagaattacacgaggttcaccaaacgcgatgcgcctcttccttcttggtcttcctccgacgtcgaggagtttatagcttccgatcccgttcatggacccaccctgaaaacagctagggaagctgcgacttatggtgttgctggagctgcacttggagctctatctaccgccgcttttgcctggaaatactctaggagtccgcatggtgctgcattgtccttcttaggaggaggtgtttttggttggacctttgggcaagaagtggcgaaccacagcttgcaactctataagctggacacaatggcggctcaaattaagttcatggaatggtgggagcgcaagactcagtgaaggggtcttgaatccagaataacaaagacgcgtgctatcttgcaaacagcttgaaatgcaataaatagtttaaatccatttccaaactttatcttttcaagctttttattacgttctcaatcttggaacatgtttgttttcctttgtctcaataatacaacatgccccagagtgt

SEQ ID NO: 279 - DNA, 481 bp, Brassica napus
  misc_feature: Ceres CLONE ID no. 1102549
  misc_feature: The sequence encodes the protein given in SEQ ID NO 177
actggactgattattttgagcggcgtagaggagcggcgttcgtctccgattgaatcaatcagaagaaaaaaaaatcgatttcgatctgagagaaagtgtgcgaagaagatgggagattcgcgatcgttgctggatggattcaaggggttctgggaggagaggttatcgttcctggataattacacgaggttcaccaaacgtgacgcgcctcttccttcttggtcttcctccgacgtcgacgagttcatagcttccgatcccgtcaatggacccaccctgaaaactgctagggaagctgcggcttttggtgctactggagctgcacttggagctgtatctactgctgcttttgcctggaaatactcgaagtctccacatggtgctgcactgtcattcttaggaggaggtctttttggttggaccttcgggcaagaagttgcgaaccacacgatgcaactgtataagctggacacgatggctg

SEQ ID NO: 280 - DNA, 705 bp, Glycine max
  misc_feature: Ceres CLONE ID no. 516401
  misc_feature: The sequence encodes the protein given in SEQ ID NO 180
aaatcgtaaaacctaaataaatacatcactgccttcagaaaacgactgcgcctagcttctagccatcctttaatcttcgtcaacgttacttttccacctcgtacgagggattcaattgagagggaaagggactgatggcagacaacacacagtcttactgggaaggctacaaagcgttttggtcagagaggttttcctttttgagcaactattcgaggttcatcaaccgtgataaacccatcccttcctggtcaagctctgatgtcgaggagttcattgcttctgatcctgttcatggacccgtcctgaaaagtgctagagaagcagtgcaatttggcctcacaggaagtgctttgggagcattatttactgcaggctatgcctggaaatattcaaagagtttacatggcgctggactgacatttttagctggaggtatatttgggtggacttttgggcatgaaatcgcaaatcacacacttcaactttacagggtagacacattggctgctgaggccaagtttctggactggtggaataagaagactggagggtattaaaactgttggcttatgggaattaatgctacatttgttatcgtttctgaaaaatgaagaataatttttggtgttggcagtgcgatttatgctcactgaataagtatgttgtgaattaggttatgttttaaaactaatgcatcatcgc

SEQ ID NO: 281 - DNA, 813 bp, Triticum aestivum
  misc_feature: Ceres CLONE ID no. 618542
  misc_feature: The sequence encodes the protein given in SEQ ID NO 181
ctaaccttttccccaaggagagaaacgagaaaggatcaccgtggaaccgatcgaatcgcagcgaagcagcggcggcggcggcggcgatggggatcggcgagcactttgagggcgtgaagcagcactgggcgcgcaacttcgccttcctcgactacttcaagaaggtctacggccgcgaccagcccctccccaagtggtccgacgccgacgtcgaagagttcatcgcctccgaccccgtctacggcccccagctcaaggccctgagggagtccaggaagttcgcgctcggcggggccctggccggcgccgcgcacctcggcggcgttgccttcaagtactccaagagcccgcacggtgtcgtgctggcgaccgggttcggagcgctcacaggcgccgtgctcgggtcggaggtggccgagcactggtacgagctctacaagatggacaagcagggggccaacctcaggttcatctactggtgggaggacaaggtctcaggccagaagaactgaagaagacttctgcataagcttatgcctgtttcagcatactggtttgacaagacaatgatgtctccagtttgggatttctagtttttacttcctagtctttttccaataaggtgcatattggccatcaactggacaatgtattttattttctctactatgggttgctctcagtttctctatgatgttcatgtttgcacctatggaaaactaaatgccagtacttttcagtctatcagttcgcacatgacctgtaagtattcaatgaccgtaaaaataatatcggggatgcctactttcttcg

SEQ ID NO: 282 - DNA, 767 bp, Zea mays subsp. mays
  misc_feature: Ceres CLONE ID no. 305154
  misc_feature: The sequence encodes the protein given in SEQ ID NO 183
aacaagcgaaccggcggcgtcatcggaccgagtggcgtcttcctcctcccttcgtaaccttccagacccgaccgcagcagcccggggcaacaagcgaaccggcggcagcgatggggatcggtgagcacttcgagggcgtcaagcagcactgggcgagcaacttcgccttcctcgactacttcaagaaggtctacggccgcgccgagcccctccccaagtggtccgacgccgacgtcgacgagttcatcgcctccgacccggtctacgggccccagctcaaggccctgcgggagtcgaggaagttcgcgctcgccggggccctcgtcggcgccgcccacctcggcggcgtcgcgctcaagtactccaaggcgccgcacggcgtcctgctggcgacgggcttcggcgcgatcaccggcgccgtgctgggatctgaggtggcggaccactggtaccagctctacgagatggacaagcagggggccaacctcaggttcatctactggtgggaggacaaggtctcaggccagaagagctgaaccacatcgagtgatgcctattctactgagcacaccagcgtgacaacaaaacattgacgtctctcatgccgagttcttagtttttctttcctagttttctctaataagtgtggaattggttgaggaagccaactggacaatgcatttttcatctccgtcatgggttatgttcatccatggtcaatctggtgtaaacagcaaatcctatccgttttcgagatatgttttctc

SEQ ID NO: 283 - DNA, 903 bp, Brassica napus
  misc_feature: Ceres CLONE ID no. 945519
  misc_feature: The sequence encodes the protein given in SEQ ID NO 186
aaaagaaacatgaacgtttcatcttttttttttgaaaaatgctagaaaaataaagatggctcacttgccacagagtctctactccgccgctaggccagagtttccatatccgggaaagtccgtccagccgaagtggagccgcttcccggtgagtgtacggtgcgcatcgaccgagtcgctaacaagtttgactcagaatgcggtggagacagagttgaagtatatggtgagtcaacacgggtggggcgtgaggaggctgagaagagacgacgaaraaragattaggagagtgtcttcggttcaagccgaagctttccacatccctctcgctcttttcaatgattttttcttcttgtttttccaggcagaagttttgtcagggcttctctacaaactaaaaaactcacctcctgacagatatgcatgtctcgtggcggagcaaacaagcgaaactgacactagttcaagctcaagtgtcgttggagtagttgacatcacagttcagacagaaaactcagtactccgccactttcccggtgaggaagaatatctttacgtctcaggcttagccgtctccaaagctcaaaggaggaagaagatggcaagtacattgttaaaggcatgtgatgttatatgttacttatggggtttcaagcttcttgctctaagagcttatgaagacgacgcagccgctagaaacttatactcaaacgctggttatagcgtggtcgagtctgatccmccttggacctctacttggataggaagaaaacgtcgcgttcttatgaccaaacgcatttyttagccgttttcggtttttctatttcttgatgcatatttgctttagcgttataggggttggtttaaatgacttggaccgatcaatatacagacagtaaaccc

SEQ ID NO: 284 - DNA, 852 bp, Brassica napus
  misc_feature: Ceres CLONE ID no. 947761
  misc_feature: The sequence encodes the protein given in SEQ ID NO 191
aacaaactattttgaaacaaacagtacgcccatggcttctccagcttccacttatgctcgaactacatgcatttgttttccaaaaatccaaaacagcatgcagttcatygacaggatgggagcatttagaaatataacgagaagaagggtgaggcttattcacgcatcacaaggtccaacaaaaccattgcctggagtagacacaagaatccactgggaaaacccggacgatgggtggataggtggaggatccgacccgatcaaacctgatgataccaatcttttcagtgatgacaaatttgctgaactaatcaaagattcttttgattctcattaccaattcttgggtgtttccacggatgctgatcttgaagatataaaatctgcttaccggagattatcgaaagagtatcatccagacacaacttcattaccacttaaaacagcttcagacaagttcatgaaactaaaagaagtctacgatgttttgagcgacgaggagagtaggagattctatgactggacactggctcaggaggttgctagtcgtcaagctgagaagatgagaatgaagcttgaggatccgaaagagcaagaatttcggaattatgaatctatacccgatatggttgatcggttaggtggaaggaacatggagcttagtgatcaagccatgaccgctcttacgttcgatgttttgatcattgtatttgccgtttgttgtatagtgtatgtggttgtctttaaagatccttattactaggtaaggagctatatacagggaagatgaaattcagggaaatctgtataggtggaaaatggaacatttatagattataacataagctggtt

SEQ ID NO: 285 - DNA, 741 bp, Glycine max
  misc_feature: Ceres CLONE ID no. 680759
  misc_feature: The sequence encodes the protein given in SEQ ID NO 192
gaaatgaaaggtattgtgatattaccgttctgttctcccatggctttcgcagcagctcctcttatccaggttgtattatacggaaatcccaagtttttgtttttgaggactactgctcgttgcacggtccacgcctctcgcagaccaccaccccctgggcctggagttgacaccagaatccattgggaaaacgaagatgaaggttggattggagctaccaataccaaacaccaacagacccacaaacccaataacaacatgttacaggctgatgactttcctgatttcctcaccgcttctttaggttctcattacgaattcttgggtgtatcaccagatgcggatgtagaagaaattaaagttgcttatcggaaattgtcaaaggagtatcatcccgacacaacttccctgcctctcaaaactgcctcagaaaaattcatgaaattaagagaggtttacaacgttcttagcaatgaagagagtcgaaagttttatgattggacccttgctcaagaggctgcaagccgccacgcagagaagatgaaaatgaaattagaagatcctcgccagcaacaactcaagaactgggaacctgttccagacatggttgaccgccttggtggaaggaatatgaagcttagtgatcaggcagtttcggccatcaccattgatctctttatcattgtttttgccctatgttgtatcatatatgttattttctttaaagaaccctattactmc

SEQ ID NO: 286 - DNA, 1086 bp, Zea mays subsp. mays
  misc_feature: Ceres CLONE ID no. 230678
  misc_feature: The sequence encodes the protein given in SEQ ID NO 196
aacatgtggccattggctaagtgaacagcgacacctcatcgcctcgccctcctaccacgacaactggaacgtgcgagcctcatcacctcccgactcccctccacgccttggaatgctgcctgcgcagacgctaacacacacgtttcccatggcagcgtccacggcctcgcgcatcttcacgcccttcctccaccggcaccagcggcgcacgaaggcagtcgtggtcgcagccgcgagcccgcccgacgccgaaccgactcctgcgacggcggacggtgcagggccggggaagaagaagacggtggacaccaggatacactggtccaaccccgacgaagggtgggtaggaggcaaggccaagaaggaaggcgacggccgcggcagcagcaagaacgagccgttgggagggaggttcgcggacctcatcaacaacgcggccgagtctcactaccagttccttggcatagcgccagaggcggacatcgaggagatcaagacggcgtaccggcggctgtccaaggagtaccacccggacacgacgacgctgccgctcaaggtggcgtcgcagaagttcatccgcctgcgagaggtgtacaacgtgctgagcaaggaggagacacggcggttctacgactggacactggcgcaggaggccgagagccgccgcctgcagcagctcaggtccaggctcgaggacccatacgagcaggacatcatcaactacaaacccgtgccagacatggttgaccgcctcggcggcaagaacatgaagcttagcgatcaggccatgactgcgctcaccatcgatatcgttatcatcatcatctccatctgctgcatcatctatgctgttttcttcaaggagcagtactgacagcagcataccagcaacagcagcaaggttgcaggagtgtaccatagacagaacattataggtaaattaactgataatgccctaagattgtcttttgggatgttatcatgcactgcatcatgtaatgtccaatagaataaggtaggaacgacgattattcatggtttgttgccaacaatcctatatttgcataatcaaatcataattccagt

SEQ ID NO: 287 - DNA, 890 bp, Brassica napus
  misc_feature: Ceres CLONE ID no. 976147
  misc_feature: The sequence encodes the protein given in SEQ ID NO 199
aaaggttttggctttttgtgaggaaatgaagcctaagagagaatcaagaggagagactacgattcacttgcaataagatttctcagcttttctragggaaaggctaaacctatggacttggctcttcattttccttcgttgatcaaacaagaattcacgagagccaatcatcttcacgttcgagatactctttcgacgagctttgggcagagtttttcaagaacagcgtttgatggtgatagaagaagctggcatggagaaaaggcttggtcttcctctttaacttggagatcaaagaaaggatatgttgtttgttgcaagaatccgtctgatgatgtacagagcttagacccgagtaaagccaagcaagaggagatcatttctctcttcagacggattcaagcttccatctccaaaggtgaggagtctcagggaactgatgagaagaaaggacttgcatcttctgggaatgagtcgctgagtaaagctattcttgacgttcttgagaaaccaagagataaaactgatggagatgctggtgtaaggatagagccgcctaagagacaagtagctcggccmccgtctagttttgccaagagatctcctactagaccatctgctccaggtcaaagaggtaagcttccaataacaaagagcagtatggaagaaacagagaaggaagagattgaaactatgaaacttgcagagctcaaagaagttgcaaagaacaaaggactcaaaggctactcaaagctaaagaagagtgagattctcgagctactcagatcctcctgatttaaaaattttcagtccaatttctctytgatatgtaaattagaaacaacagatacggcttggagtttgtttaaagtagatagagtttaaaactg

SEQ ID NO: 288 - DNA, 523 bp, Brassica napus
  misc_feature: Ceres CLONE ID no. 871180
  misc_feature: The sequence encodes the protein given in SEQ ID NO 204
ctatctgaaagcaaaacattcaaagccacttcatagttcatccaactatggcaactatagctactagtctaaacattggaacccaaggagccgtcatcaccagcgagtctcgaccagttcgtctcgcaggtccagtccgtttgaacaatccttggaatcttggttcaagaacaacgaaccggatggcggcagttaggccggttaaagcgacgccagaaggagtgatatcggataaagtggagaagagcatcaaggacgcagaggagacttgtgcgggagatccagtgagcggagagtgtgtagctgcgtgggacgaggtcgaggagctaagcgcagcagctagccacgctagagacaagaagaaagactccgaccctttggaggaatactgcaaagacaatcctgagactagcgagtgtcgtacttacgactgatccatcatgttccaggattatattatattacacttttgttccggtcaatttggtgatatgatatgaatgctgtctttgastactcacgc

SEQ ID NO: 289 - DNA, 585 bp, Glycine max
  misc_feature: Ceres CLONE ID no. 1115650
  misc_feature: The sequence encodes the protein given in SEQ ID NO 205
atctgaaagcaaaacattcaaagccacttcatagttcatccaactatggcaactatagctactagtctaaacattggaacccaaggagccgtcatcaccagcgagtctcgaccagttcgtctcgcaggtccagtccgtttgaacaatccttggaatcttggttcaagaacaacgaaccggatggcggcagttaggccggttaaagcgacgccagaaggagtgatatcggataaagtggagaagagcatcaaggacgcagaggagacttgtgcgggagatccagtgagcggagagtgtgtagctgcgtgggacgaggtcgaggagctaagcgcagcagctagccacgctagagacaagaagaaagactcccgaccctttggaggaatactgcaaagacaatcctgagactagcgagtgtcgtacttacgactgatccatcatgttccaggattatattatattacacttttgttccggtcaatttggtgatatgatatgaatgctgtctttgagactcacgcaggttatatactttgtaatttggcaagatttataatcgaaaatcgaattaatcataagaaaatc

SEQ ID NO: 290 - DNA, 682 bp, Panicum virgatum
  misc_feature: Ceres CLONE ID no. 1767185
  misc_feature: The sequence encodes the protein given in SEQ ID NO 206
aacgagtggccgaaaggcgataagaaacgagtgcacatgaaagcgctaccctttgacgagcaaagcactatataaacctcatctcacaaatctccaacgcaacgcctcgtacagttcatcaagtaaatccacatcagatcacacacaagctagctgcaaaaatggcgtcgacggtggcgagcctctctaccccggcgacggccttcgcggccgcggacgtggtcccgaggaggaaggccgccgaaggccgcgtctggttccccgtggcgcgccacggcagcttcgcggtgaggtcgagcgggccggggacgccgccggggatctccgacaaggtgtcggagagcatcaagaaggcggaggagacgtgcgcggacgagaaggtctccggggagtgcgcggcggcgtgggacgaggtggaggagctcagcgccgcggcgagccacgcccgggacaagctcaaggacagcagcgacccgctcgagaactactgcaaggagaaccccgagaccgacgagtgccgcatctacgacaactagagcaagcctgctgtatatatcgatctgtgtatcagcaatcaaaagaagttaaatttgttatagatatagataattaataaacgaataaaggatatttgaccgcgggtcatacatagacgtcactataaaaaatcatttaatctatg

SEQ ID NO: 291 - DNA, 607 bp, Triticum aestivum
  misc_feature: Ceres CLONE ID no. 772741
  misc_feature: The sequence encodes the protein given in SEQ ID NO 208
aacttgttacagcctacccacataaaatctccgtcgatccaccacaccctgcaatggcgtccgcgctcaccaacgtgagcctgtctaccttcgcgcccacggccaggggcgacgtcctcgcgaggccgcaggtggccgccgcccgcgtcaccttcccgacggcgcaccgcggcagcggcgccctctcctgcagggcgggcgggccggccacgccgccgggcatctccgacaagatgtcggacagcatcaaggaggcccaggagacgtgctcggaggacgccgccagcggggagtgcgcggcggcgtgggacgaggtggaggagctcagcgccgccgccagccacgcccgggacaagctcaaggactccgacccgctggagaactactgcaaggagaaccccgagaccgacgagtgccgcacctacgacagctgagcgtacgtgctaatctcttctggatggcggatggtgaaggtggacgtggtgttcttggctcgtgggagcccgagaaacctgctatgtctcaacctaccgttacttacacgatcgggatgtatgtagtaaaaacgctccaaatattttccctgggacatacgtggttgatatac

SEQ ID NO: 292 - DNA, 700 bp, Panicum virgatum
  misc_feature: Ceres CLONE ID no. 1760834
  misc_feature: The sequence encodes the protein given in SEQ ID NO 209
  misc_feature (24)..(24): n is a, c, t, g, unknown, or other
  misc_feature (25)..(25): n is a, c, t, g, unknown, or other
  misc_feature (26)..(26): n is a, c, t, g, unknown, or other
  misc_feature (27)..(27): n is a, c, t, g, unknown, or other
  misc_feature (28)..(28): n is a, c, t, g, unknown, or other
  misc_feature (29)..(29): n is a, c, t, g, unknown, or other
caacgcctcgtacagttcatcaannnnnnccacatcagatcacgcacaagctagctgcaaaaatggcgtcgacggtggcgagcctctctaccccggcgacggccttcgcggccgcggacgtggtcccgaggaggaaggccgccgaaggccgcgtctggttccccgtggcgcgccgcggcagcttcgcggtgaggtcgagcgggccggggacgccgccggggatctccgacaaggtgtcggagagcatcaagaaggcggaggagacgtgtgcggacgagaaggtctccggggagtgcgcggcggcgtgggacgaggtggaggatctcagcgccgcggcgagccacgcccgggacaagctcaaggacagcagcgacccgctcgagaactactgcaaggagaaccccgagaccgacgagtgccgcatctacgacaactagagcaagcctgctgtatatatcgatctgtgtatcagcaatcaaagacgttaaatttgttatagatatagataattaataaaggaataaaggatatttgaccgcgggtcaaaaaaaaaatttttatttcttatttgttatgttacccttgggtgagcacgaattgttcgggaattacctccctaacgaggaagccttttgtctgcttttattctaagttgataatgttctctcactaaagcagtatattatatttccaaacttac

SEQ ID NO: 293 - DNA, 694 bp, Panicum virgatum
  misc_feature: Ceres CLONE ID no. 1762311
  misc_feature: The sequence encodes the protein given in SEQ ID NO 210
gcaacacctcgtacagttcatcaagtaaagccacatcagatcacacacaatctagctgcagaaatggcgtcgacggtggcgagcctctctaccccggcggcggcctttgcggccgcagacgtagtcccgaggaggaagatcgccggccgcgtctggttccccgtggcacgccgcgtcggcttcgcggtgaggtcgagcgggccggggacgccgccggggatctcggacaaggtgtcagagagcatcaagaaagcagaggagacgtgcgcggacgagaaggtctccggagagtgcgcggcggcgtgggacgaggtggaggagctcagcgccgcggcgagccacgcccgggacaagctcaaggagaacagcgacccgctggagaactactgcaaggagaaccccgagaccgacgagtgccgcatctacgacaactagaccatgcctgtatccagtggcggagccagggggctggcaggggccatgccccccccccccccccgccaagcttggtgtaagtctactataatacatatataatgatgattgtataagtataaaattaaagaatacactaatctactgtagacatagaaaactgatttttagttattacctgtgtcaatatattttaactgtatatttcacaaagtaggatctttgagtaatcatgatcatttttaggtttttagctgat

SEQ ID NO: 294 - DNA, 374 bp, Brassica napus
  misc_feature: Ceres CLONE ID no. 1080241
  misc_feature: The sequence encodes the protein given in SEQ ID NO 211
atcacaaaaatcattcaaagcctgcctggtttcytttawttycacccaacgatggcaactatagctactagccttaacatagcaacccaaagagccatcrccagcgagaaccgaccggctcgtctcgcttgtcctgtccgtttgaacaacccgtggaatcttggttcaagaacgacgaaccgcttggtgagctttaggccggtcaaatcagctccagaaggagtaatatccgataaagtggagaagagcattaaggacgcmgaggagacttgtgccggcgatccagtgagcggagagtgcgtagctgcttgggacgaggtcgaggagcttagcgcagcagctagccmcgctagagacaagaagaaagctgaagg

SEQ ID NO: 295 - DNA, 450 bp, Brassica napus
  misc_feature: Ceres CLONE ID no. 960043
  misc_feature: The sequence encodes the protein given in SEQ ID NO 212
tctcttctccttgcgtcaaaaaattctctcctctatcctaagtcctccggcgatggcaaccatagctgcaaccggtctcaacgtcgcaactccaagtgcgttcgttcgaccggtggctcgactatctgctccggtccgtttgaactacccgtggaaattcagttcgatgaaccggatggttatgtctgttaaggcgacatctgagggagggatatcggataaggtggagaagagtattcaggaggctaaggagacttgcgccgacgatccggtgagcggagagtgtgtggcagcgtgggacgaggtggaggagctgagtgcagcggcgagtcatgccagggacaagaagaaggctggtggatcagatcctttggaagaatattgcagtgataatcctgagaccgatgagtgtcgtacttatgataactgaaacatgttgaaaatttaggt

SEQ ID NO: 296 - DNA, 548 bp, Panicum virgatum
  misc_feature: Ceres CLONE ID no. 1782555
  misc_feature: The sequence encodes the protein given in SEQ ID NO 213
gagctgaacacctcgtacagttcatcaagtaaagccacatcagatcacacacaatctagctgcagaaatggcgtcgacggtggcgagcctctctaccccggcggcggccttcgcggccgcagacgtagtcccgaggaggaagatcgccggccgcgtctggttccccgtggcgcgtcgcgtcggcttcacggtgaggtcgagcaggccggggacgccgccggggatctcagacaaggtgtcggagagcatcaagaaggcggaggagacgtgcgcggacgagaaggtctccggagagtgcgcggcggcgtgggacgaggtggaggagctcagcgccgcggcgagccacgcccgggacaggctcaaggagaacagcgacccgctggagaactactgcaaggagaaccccgagaccgacgagtgccgcatctatgacaactagaccatgcctgtatccagtggcggagctaggggggctggcaggggccatggccccccctaagcttggtgtaagtctactataatacatatataatgatgattgtataagc

SEQ ID NO: 297 - DNA, 410 bp, Brassica napus
  misc_feature: Ceres CLONE ID no. 1036232
  misc_feature: The sequence is a partial sequence of Ceres CLONE ID no. 1036232
gtatcacaaaaatcattcaaagcctgcctgtatttttttatttatccaaacgatggcaactatagctactagccttaacatcgcaacccagcgagccgtcatcaccagcaagagccaaccagctcgtctcgcctgtccagtccgtttgaacaacccgtggaaacttggtycaagaacaaaccgcttagtgagctttaggccggtcaaatcaacgccagaaggtgtgatatccgataaagtggagaaaagcattaaagacgcaaaggagagttgtgctgacgatcccgtcagcggagagtgtgtagctgcgtgggacgaggttgaggagctcagcgcagcagctagtcacgctagagacaagaagaaagctggtggttccgamcctttggaggaatactgcmaagacaatc

SEQ ID NO: 298 - DNA, 495 bp, Glycine max
  misc_feature: Ceres CLONE ID no. 853331
  misc_feature: The sequence encodes the protein given in SEQ ID NO 222
aaaaattccgatcttagtttgcgtttggcgtaggtggaagaagaagagaaaagagagagaagggtaaggtaaccctagagtggtgaatcgaatctgcaaagatggaagctgtttctcgaagaagaggtggaggcattttcgaaagcctctacaaggtcgttatgcgtcgcaactctgtctacgttaccttcgtcatcgctggcgccttcctcggagaacgggctgtagattatggagtccacaagctctgggaggctaataatgttgggaaacgatatgaagacattcctgtgctagggcaaaggcagtcagaatagtgaccagcttgttagccattttgaagttttattattttcatgaaaatttgaagtgattaagagctggaagcagtttccatttctacaataaataccatatgcttgtctctttcaggctwaactcttatgcgtggtttcatttactggccattggaaatattaaatattgaaccattgc

SEQ ID NO: 299 - DNA, 432 bp, Zea mays subsp. mays
  misc_feature: Ceres CLONE ID no. 208991
  misc_feature: The sequence encodes the protein given in SEQ ID NO 223
acatttgaggaatccgcctttgatataaagaagacgctcccgaatccgtctccgcctcctgtcgctcgctctccctgtctcccgcacgccgacccgcagccgccgccgttcgccatgggtttcctcgacgcgctctaccgtgtggtgatgcgccgcaacgccgtctacgttaccttcgtcgtcgccggcgctttcgcgggcgagcgggcggtggactacggcgttcacaagatctgggagatgaacaacctcgggaaaaggtacgaagacatatcggttttggggcagaggccagctgaggaatgataaattttggtcaccagtttgcttcggtttgaccgtttcattttggcacagtaataaacgatgtaaacttacgctgcycctatgacctccttctcattcgtttactctgaaaatgcttttgtgggg

SEQ ID NO: 300 - DNA, 436 bp, Zea mays subsp. mays
  misc_feature: Ceres CLONE ID no. 336493
  misc_feature: The sequence encodes the protein given in SEQ ID NO 224
ataaaaagaagacgtctccgaatccgtctccgcctttcctgtctcctctcgctcgctctccccgtctcccgcacgcccatccgccgccgccgttcgccatgggcctcctcgactcgctctaccgcgtggtgatgcgccgcaacgccgtctatgttaccttcgtcgtcgccggtgcctttgcgggcgagcgggctgtagactacggagttcacaagatctgggagatgaacaacctcgggaaaaggtacgaagacataccagttttggggcagaggccagccgaagaatgatatactttggtcgccatttagctccggtttaaccgtttcattttcgcacaataataagctgtgtaaacttcttactctgctgctgagagctgcttcccattcattttactctgaacatgctgtgagggaatttcgtggtgcatggc

SEQ ID NO: 301 - DNA, 589 bp, Zea mays subsp. mays
  misc_feature: Ceres CLONE ID no. 1064967
  misc_feature: The sequence encodes the protein given in SEQ ID NO 225
agaaacgctcctcaagcgcaactggttcgtccgtcgtcgcgtaccgaatctccaccatcccccgcgcgcgccgccgcctccgccgtcgacgatgggtctctgggacgccatgtaccgcgtggtgatgcgccgtaacggcgtgtacgtcaccttcgtcgtcgccggcgccttcgctggcgagcggctggtggactacggcgtcaacaaggtctgggagatgaacaacgtcgggaaacggtatcaagacatatctgttctggggcaaaggccggttgaggagtgaagacattgaagcccagatttcccatgatcttttaagtgaaattaggcaccttataaagctccatgttttggcattttcctttggcacaataatattgtaaaactctcttgctgggtgttattcactccctttgagcactatggcatcaatctgttccacagcaaagtgattgctatgtctggtccctttggaacaagttcaatactatccaaattatgaattggacttctttctaatgtcttatatgtaattggcatgctgttgctcgtctcttttggacaagctaatgaatattttgttgatatt

SEQ ID NO: 302 - DNA, 597 bp, Triticum aestivum
  misc_feature: Ceres CLONE ID no. 639802
  misc_feature: The sequence encodes the protein given in SEQ ID NO 226
agaagctcccatcagaaacgctcctcaagcgcaactggwtcgtccgtcgtcgcgtaccgaatctccaccatcccccgcgcgcgccgccgcctccgccgtcgacgatgggtctctgggacgccatgtaccgcgtggtgatgcgccgtaacggcgtgtacgtcaccttcgtcgtcgccggcgccttcgctggcgagcggctggtggactacggcgtcaacaaggtctgggagatgaacaacgtcgggaaacggtatcaagacatatctgttctggggcaaaggccggttgaggagtgaagacattgaagcccagatttcccatgatcttttaagtgaaattaggcaccttataaagctccatgttttggcattttcctttggcacaataatattgtaaaactctcttgctgggtgttattcactccctttgagcactatggcatcaatctgttccacagcaaagtgattgctatgtctggtccctttggaacaagttcaatactatccaaattatgaattggacttctttctaatgtcttatatgtaattggcatgctgttgctcgtctcttttggacaagctaatgaatattttgttg

SEQ ID NO: 303 - DNA, 1754 bp, Glycine max
  misc_feature: Ceres CLONE ID no. 690176
  misc_feature: The sequence encodes the protein given in SEQ ID NO 230
atatatacacacagtaccaaccactcttttttacttatggcatctttcatcttcacacctgtactctttcttcttatcatctccgccgtccttctcttcctccaccgccgatcccgctgccggcgcttccgcctaccgcctggtacactcgggctccccttcgtcggcgaaaccttacagctcatatcagcttacaagagtgacaacccggaacccttcatggaccagcgcgtgaaacggtacggtccaatcttcaccacccatgtgttcggcgaacccaccgtgttctcgaccgacccagaaacgaaccggttcattttgctcaacgaagggaagctcttcgaatgcagctaccccggttcgatatcgaacctccttgggaaacactctctgctcctcatgaaaggttctcttcacaagagaatgcactccctcactatgagcttcgccaactcctccatcatcaaggaccatttattggtcgacatagaccgcctcatccggctcaacttggattcctggtccgaccgggttcttctcatggaagaagccaagaagataacgtttgagttgacagtgaagcagctgatgagctttgatccaggtgaatggactgagacactaaggaaagagtacgtgcttgtgattgaaggatttttctcagttcccttgcctctcttctcaagtacctaccgtagagccatcaaggctaggacgaaggtggcagaggcattaacactggtagtgagggatagaagaaaagaaagcgtaacggaggagaaaaagaatgacatgctaggggcattgttggcctccggctaccacttttccgacgaggaaatagtcgattttatgttggctttgctcgtcgccggctatgaaaccacctctacaataatgactcttgccatcaagttcctcaccgagactcccttagcactggcacaactcaaggaagagcatgatcaaatcagagccaagaagagttgcccagaggcaccactggagtggacagattataagtcaatggcatttactcaatgtgttgtgaatgagactttaagggtggcaaacataattggtgcgatatttaggagagcaatgacagacatcaacataaaaggttacactattccaaagggatggagggtcgttgcttcatttcgtgcggtacatctaaaccctgaccatttcaaagatgcccgcaccttcaatccatggagatggcagagtaactcagaagcaagtagccctgggaatgtatataccccatttggaggagggccacgtctgtgtcctgggtatgagcttgccagagtggtgctctctgtcttccttcatcgcattgtcacccgttatagttggtttcctgcagaagaagataagttggtgttttttccaacgactaggacgcagaagaggtatcctatcatagtgaagcgtagagaggagtccaaactaagtaaatcgccatgagagacaccacacaaagaagaggaagaagagattgtagatgattttaatcattgtaatgtctaatgtattaagcaataatgaagtttcatccmctagtttagccgtttatattttatttattttagggggttataggaaggaatgtyttattagtagaccttaggaagggatgggaaatgaggatgtgaaagatcaaacccctcatcaccctaataaaacagttgagctaaatccacctgtgkatatgatyttaattaattcctacaaatcctttcacg

SEQ ID NO: 304 - DNA, 1606 bp, Glycine max
  misc_feature: Ceres CLONE ID no. 574698
  misc_feature: The sequence encodes the protein given in SEQ ID NO 233
atttaacttcttctcttctcttccctgttacagcaatggcttctttgccagctttgccaacactcctcctctcgttcgccgccatcttcttcaccgtcctcctcctcttcctccgccgccggcagctccgcctcccgccggggagctacggcttgccgttgatcggcgagacgctgcaactgatatcggcgtacaagagcgacaatccagagccgttcatcgacgagcgcgtggagcggtacgggtcgatcttcacgacgcacgtgttcggagaggcgacggtgttctcggcggatccggaggtgaaccggttcattctgcagaacgaagggaggctgttggattgcagctaccccggttcgatatcgaacctgctcggaaaacactctcttctgttgatgaaaggtggtctccacaagagaatgcactctctgacgatgagcttggccaattcctccatcatcaaggatcatcttcttcaccacatcgaccgcctcgtctgcctcaacttggacgcctggtccaaccgcgtctttcttatggaccaggcaaaaaagataacatttgagctaacggtgaagcagttgatgagctttgacccagatgaatggactgagaatctaagaaaagagtatgttcttgtgattgaaggattcttcactctcccttttcctctcttctccaccacataccgcagagccatcaaggcaagaacaaaggtggcagaggcactaacgttggtagtaaggcagaggagaaaagagtatgatgaagacaaagagaaaaagaatgacatgcttggggcactgttggcctccggcgaccacttttccgacgaggaaatagtggattttttgttggctttgctcgtcgccggttatgagaccacctctaccataatgactcttgcgatcaagttcctcactgagactcccctggccttggcacagctcaaggaagagcatgaccaaatcagagcaagaagtgacccagggacaccactggaatggaccgattacaagtcaatggcgtttactcaatgtgttgtgaatgagaccttgagagtggcaaacataattggtgggatttttaggagagcaaggacagacattgacataaaaggttacactattcctaagggatggaaagtctttgcatcatttcgtgctgtacatctgaatcctgaacattacaaagatgcccggtccttcaatccctggagatggcagagtaactcatcagaagcaacaaaccctggtaatgtttatacaccatttggaggagggccacggttgtgccctggctataagctagccagagttgtactttccgtcttccttcaccgcattgttacccgcttcagttgggttcctgctgaggaagataagttggtgtttttcccaactactaggacgcagaagaggtatccaattattgtgcagcgtagagactagagaggagtgcagaccatgtatagcaatatgaaaattaagagcccaacagatagagaagggccaaaaggaagatgagtgtagatcagtttaataagttaatgttcatcatatgtaaataaatgataaaattcatatctcccagttcatatatc

SEQ ID NO: 305 - DNA, 1663 bp, Glycine max
  misc_feature: Ceres CLONE ID no. 718939
  misc_feature: The sequence encodes the protein given in SEQ ID NO 235
aaacttcttttatttccttcttcttctcttctctgttacagcaatggcttctttgccaacacttctctcgttcgccgtcatcttcttcaccgtcgccctcttatacctccgccgcgtgttccgccgccgtcagttccgcctcccgccggggagccacggcctgccgttgatcggcgagacgctgcagctgatatcggcgtacaagagcgacaatccggagcctttcatcgacgagcgcgtggagcggtacggttcgatcttcacgacgcacgtgttcggcgagccgacggtgttctcggcggacccggaggtgaaccggttcattctgcagaacgaagggaagctgttggattgcagttatcccggttcgatatcgaacctgctcggaaaacactctcttctgttgatgaaaggtgctctccacaagagaatgcactctctcacaatgagcttcgccaactcctccatcatcaaggatcatcttcttcaccacatcgaccgcctcatctgcctcaacctcgatgcctggtccgacactgtctttctcatggatcaggcaaaaaagataacatttgagttaacggtgaagcagttgatgagctttgacccagatgaatggactgagaatctaaggaaagagtatgttcttgtgattgaaggattcttcactctcccttttcctctcttctccaccacataccgcagagccatcaaggcaagaacaaaggtggcagaggcactagcgttggtagtgaggcagaggagaaaagagtatggtgaaaacaaagagaaaaagagtgacatgcttggggcactgttggcctccggcgaccacctttccgacgaggaaatagtggattttttgttggctttgctcgtcgccggttacgaaaccacctctaccataatgactcttgcgatcaagttcctcactgagactcctctggccttggcacagctcaaggaagagcatgaccaaatcagagcaaagagtcacccaggggcaccactggaatggacggattacaagtcaatggcatttactcaatgtgttgtgaatgagaccttgagagtggcaaacataattggtgggatatttaggagagcaacgacagacatcaacataaaaggttacactattcctaagggatggaaagtctttgcatcatttcgtgctgtacatctgaatcctgaacattacaaagatgcccggtccttcaatccctggagatggcagagtaactcatcagaaacagcaaatcctgggaatgtttatacaccatttggaggagggccaaggttgtgccctggctatgagctagccagagttgtactgtctgtcttccttcaccgcattgttacccgcttcagttgggttcctgctgaggaagataagttggtgttttttccaactactaggacgcagaagaggtatcctattattgtgcagcgtagacattagagaggaatgaccatgtatagcaatatgaaaattaagagcacaacagatagagaagggaaaaaaggaagctgagtgtagatcagtttaataagttaattttcatcacatgtaaataaataataaaattcatatctccccgttcatatatcaattgtctctgcaatgctcaacaaccagaaaagttggcaagaattttaacgc

SEQ ID NO: 306 - DNA, 1797 bp, Zea mays subsp. mays
  misc_feature: Ceres CLONE ID no. 339347
  misc_feature: The sequence encodes the protein given in SEQ ID NO 242
ctataaataaataccgcccaccaacatctggtggtatcaaagaatctcctctgtatctctggcagccgcatcgtctcaatctcagtcactcccggacacgcgcacgagccaccccgcacccaactaaccaacccatggacgcgggcggaacgccgccgctgctgttcctcctggccgcggcggccgccctgctgggcgcggcgctcaggtggctgctcctggcctggcggtcggcggcgaggacggggcggctgccaccgggcagcacggggctgccgctcatcggggagacgctgcgcctcatcgcggcgtacaagacgccgaacccggagccgttcatcgacgagcgcgtggcgcggcacggcagcggggtgttcacgacgcacgtgttcggcgagcgcaccgtgttctccgcggacccggccttcaaccgcctgctcctggccgccgagggccgcgccgtcagctgcagctacccgtcgtccatcgccacgctgctgggcccgcgctcgctgctcctcaccgccggccccgcgcacaagcgcctccactcgctcacgctcgcccgcctcggccggccggcctcgccgccgctgctggcgcacatcgaccgcctcgtcctcgccaccctgcgggactggggccggccaggcgccggcgccgtcgtccgcctcctcgacgaggccaagaagatcaccttcaacctcactgtctggcagctcgtcagcatcgagcctgggccctggaccgagagcctccgccgcgagtacgtcaagctcgtcgacggcttcttctccatccccttccccttcgcctacctcctccctttcaccgcctacggccaggccctcaaggcgaggaagaaggtggctggagctcttcgggaggtgataaggaagaggatgggcgaggaggccggaactggccctggcgccggtagaaatggggagaagaaggacatggtggaggagcttctggaagcagagggtgggagcttctcggtggaggagatggtggatttctgcctgtctctgctggtggctggctacgagaccacctccgtgctcatgacgctcgccgtcaagttcctcaccgagacgcccactgcactggcgcagctcaaggaagagcacgacagcatcagacacaggaaaggcaaggacgagcagcctctgcaatggagcgattacaagtcgatgccgtttacacaatgcgtgatcagtgagacgctgcgcgtggctaacttgatcagcggggtgttcaggcgggcgaacaccgacatccatttcaaagattacgttatcccaaagggctgcagaatcttcgcgtcgttccgagccgtgcacctgagccccgagcactacgagaacgctcgagccttcgacccctggagatggcagcagagcaagaaggagggagtactagtagtagggcaggacgcgcagcagggggccagggccagcgtgttcactcccttcggcggggggcctcgcctgtgcccgggccacgagcttgcccgcgtcgtggtctccgttttcctccaccgcctggtgacgcgcttcagctgggaagaggctgaggaggacagggtcgtcttcttccccaccacccgcaccctcaaagggtaccccatcatcctgcggcggcgaccgggttgggatttctgacctagctcatcatgttacaatagagtcgatccatctatagttgttacactcatctctctctctctctctctctctgtctgtaataacactactgtctaatataaacaagcatctccgctctattctgttc

SEQ ID NO: 307 - DNA, 1077 bp, Glycine max
  misc_feature: Ceres CLONE ID no. 571162
  misc_feature: The sequence encodes the protein given in SEQ ID NO 249
aaaaatggtaaccatgtatggaatatggtgcttcatcacggtcctgttgttctccccagtggcgttttcggaactgtgcaacccacaggacaagaaagtgctgctccaaatcaagaaggacttcaacaacccttacctgctagcctcctggaaccctaacaccgattgctgcaactggtactgcgtccagtgccaccccgaaacgcaccgcatcaactccctcgtcatattatcctctgttccccaaaccaatttatccggcccaataccaccctccgtcggtgacctaccttttcttgagacccttcaattccacaagctccctaaactcaccggcccaattcagcccactatagccaagctcactaaactcaaggagatctacatcagctggaccaatgtctccggcccagtacccgatttcttggcccggctcactaacctccagtttcttgacctttcctttaataacctctcaggcccaatccccagctcactttcccagctgtccaacctagtttccttacgcttggaccggaataggctcacgggcccaatcccggaatcattcgggtccttcaagaagcctggcccgagcctgtggctatcccacaaccagctttccgggcccattccggcttccttggccaacatagacccacaaaggatagacttctccaggaacaaactcgaaggcgacgcctccgtgcttttcggtcgcaacaaaacgacacagatagttgacgtttcgaggaactcgttggcgtttgatttatccaaggtggagttccccacgagcttgatatcgttggatctgaatcacaatcagatcmccgggagcattcccgtggggttgaccgcagtggattttttgcaggggttcaacgtgagctataatcggttgtgtggtgagataccgcagggtgggagattgcaaaagtttgatgtgtattcgtattttcacaacaagtgtttatgtggatcaccccttactagctgcaagtgaagtgaattgtgcagcagagaatacgtgcatttttaaataaaaagaatatctctttctgtagacattgaaag

SEQ ID NO: 308 - DNA, 786 bp, Panicum virgatum
  misc_feature: Ceres CLONE ID no.1779106
  misc_feature: The sequence encodes the protein given in SEQ ID NO 309
acatctaccaatccacaccaaccggcaaccggggagagagccgccacaccacctccccgccgtcgaaaggaatccaggggatcagcgggccagcggcggcgcggcgatggggatcggggagcacttcgagggcgtcaagcagcactgggcgcgcaacttcgccttcctcgactacttcaagaaggtctacggccgcgccgagcccctccccaagtggtccgacgccgacgtcgaggagttcatcgcctccgacccggtctacggcccccagctcaaggccctgcgggagtcgaggaagttcgcgctcgccggggccctcgccggcgccgcccacctcggcggcgtcgcgttcaagtactccaaggcgccgcacggcgtcgtgctggcgaccgggttcggggcgatcaccggcgccgtgctgggatccgaggtggcggagcactggtaccagctctacaagatggacaagcagggggccaacctcaggttcatctactggtgggaggacaaggtttcaggtcagaagagctgaaccacattaatgatgcatatgtgagcataccagcttgacaaaacagtgatcttctgtggaatttgtagtttttgcttcctagttttttccaataaggtgcatattggttgtggaaatcaactggagaatgtactttactctatcgtgagtgatgtttatccttagcactctacaatccttatgcttgctctggtgtaaacattaacccgatcttttttaagacatgtttccttgaaaaaaaaaaaaaaaaaaaa

SEQ ID NO: 309 - protein, 141 aa, Panicum virgatum
  misc_feature: Ceres CLONE ID no.1779106
  misc_feature: The sequence is a funtional homolog of Ceres ANNOT ID no. 542494 at SEQ ID NO. 175 with e-value of 2.89E-28 and BLAST sequence identity of 44.3%
MGIGEHFEGVKQHWARNFAFLDYFKKVYGRAEPLPKWSDADVEEFIASDPVYGPQLKALRESRKFALAGALAGAAHLGGVAFKYSKAPHGVVLATGFGAITGAVLGSEVAEHWYQLYKMDKQGANLRFIYWWEDKVSGQKS

SEQ ID NO: 310 - DNA, 791 bp, Musa acuminata
  misc_feature: Ceres CLONE ID no.1715450
  misc_feature: The sequence encodes the protein given in SEQ ID NO 311
agctttgccgtcactcttgcaatggcctccacggcctcgccttccttctctccgcttttctgtgggaggaagcaggcaacacccgcactgcggcagatgcacgtcgtcgcagcagcaccggattcctccggcgaaccaactcgaaagcgccgcgtcgacaccaggattcactggtccagcccggacgaaggttgggtcgggggaaagaccaagccggacaccggcgctagcgagaagaaagagtatctgggagaaagattcgcggatctcatcaaatcgactgcttcccactaccaatttcttggagtatcagcagaagcggacatggaggagatcaaggcggcgtaccgaaggctgtcgaaggagtaccatcccgacacgacgtcgctccctctcaaggctgcctcggagaagttcattcagctgcgggaggcctacaacgtggtgagcaacgaggacagccggcgcttctacgattggacgctggcgcaagaggcggagagccgccgcctgcgacagatgcggatgaagctggaggatccgtacgagcaggacctgcgcaactggcagtccgtgccggacacggtcgaccgcctcggtgggaagaacatgaagctgagcgatcaagcgatgacggccctcaccatcgacatcggcatcatcctcttcaccatctgctgcatcatctacgtcgtcctgttcaaggaatcatactaacaagtgacaccaatcttatgtaaagaagtctcgccatgcaaataaacatggattacgaagctagtaattcgacg

SEQ ID NO: 311 - protein, 231 aa, Musa acuminata
  misc_feature: Ceres CLONE ID no.1715450
  misc_feature (89)..(155): Pfam Name. DnaJ Pfam Description. DnaJ domain
  misc_feature: The sequence is a funtional homolog of Ceres ANNOT ID no. 564261 at SEQ ID NO. 190 with e-value of 8.69E-68 and BLAST sequence identity of 65.8%
MASTASPSFSPLFCGRKQATPALRQMHVVAAAPDSSGEPTRKRRVDTRIHWSSPDEGWVGGKTKPDTGASEKKEYLGERFADLIKSTASHYQFLGVSAEADMEEIKAAYRRLSKEYHPDTTSLPLKAASEKFIQLREAYNVVSNEDSRRFYDWTLAQEAESRRLRQMRMKLEDPYEQDLRNWQSVPDTVDRLGGKNMKLSDQAMTALTIDIGIILFTICCIIYVVLFKESY

SEQ ID NO: 312 - DNA, 1003 bp, Panicum virgatum
  misc_feature: Ceres CLONE ID no.1763963
  misc_feature: The sequence encodes the protein given in SEQ ID NO 313
acgagcacctctgtggctctgtctcgactctcaagacttctctccgcagcctcagatgatactcccctgccgcagacgctgacacgcacatttcccatggcggcagccacggcctcgcgccccctcacgcccctcctccaccggcaccagccgcgcagccggcggcgcgcgagcgccatcgtcgttgccgccgcgagcacgccggacgccgagccgacggccgcagccggtgcggggcaggagaagaagaagacggtggatacgaggatacactggtccgacccggacgaagggtggatcggtggcaaggccaagaaggacggcgctggcggccgcggcaagaacgagccgctgggagggaggttcgccgacctcatcaacgccgcgtccgagtctcactaccagttcctggggataacgccggaggcggacatcgaggagatcaaggcagcgtaccggcggctgtccaaggagtaccacccagacacgacgactctacaactcaaggtggcgtcggagaagttcatccgcctccgggaggtgtacaacgtgctgagcaaggaggaaagccggcggttctacgactggacgctggcgcaggaggccgagagccggcggctgcagcagctcaggtccaggctcgaggacccctacgagcaggacatccagaactacgagtccgtgccagacatggtcgaccgcctcggcggcaggaacatgaagctcagcgaccaggccatgaccgcgctcaccattgatttcgtcatcatcattatctccgtcatctgcatcatctacgctgtgttcaaggagcagtactgacagcagcaaggttgaaggagtgtaccatatacagaacagtattcctaggtaaattaactgataatacctcaagactgtctttacagatgttatatacagtgtcatcttgttttgtcaaatagaacaagatagcaacaaataattcatggtattgtgtcaacaaaaaaaaaaaaaaaaaaaa

SEQ ID NO: 313 - protein, 241 aa, Panicum virgatum
  misc_feature: Ceres CLONE ID no.1763963
  misc_feature (100)..(166): Pfam Name. DnaJ Pfam Description. DnaJ domain
  misc_feature: The sequence is a funtional homolog of Ceres ANNOT ID no. 564261 at SEQ ID NO. 190 with e-value of 4.59E-62 and BLAST sequence identity of 62.6%
MAAATASRPLTPLLHRHQPRSRRRASAIVVAAASTPDAEPTAAAGAGQEKKKTVDTRIHWSDPDEGWIGGKAKKDGAGGRGKNEPLGGRFADLINAASESHYQFLGITPEADIEEIKAAYRRLSKEYHPDTTTLQLKVASEKFIRLREVYNVLSKEESRRFYDWTLAQEAESRRLQQLRSRLEDPYEQDIQNYESVPDMVDRLGGRNMKLSDQAMTALTIDFVIIIISVICIIYAVFKEQY

SEQ ID NO: 314 - DNA, 1024 bp, Gossypium hirsutum
  misc_feature: Ceres CLONE ID no.1849790
  misc_feature (1)..(1024): The sequence encodes the protein given in SEQ ID NO 315
gaattctaagccacagaaaacttgagggcctgaggcaatggccaatggcaaacaaagcttcgcttctttcattctctcaaattctgaaaactcctgcaatccgagttacagagttccccaccaatggcgtccacctctactctccaagctccatattctctctccctcaaaccccaaaacgtgacccaccttctacatggctcgagagccgccacgacgagagccaggagccgaaggagaacgtacagtggggcggccgtttttgcagcaacaacgggtccaagcaaaccccaaagacctcctccaggagtcgataccagaatccactgggataatgaagatgaaggctggattggggagtcatccaattcccggcaaaccaaggagaaactgaatcctgaagaagaacaaaagagtctcctgggtgaaaagtttgctgatttcctcaatgactcctctgattctcattaccagttcttaggagtctcagcagaagccgatttggaggacataaaagcagcttacagaaggctgtcaaaagagtatcatccagacacaacttcgctaccattgaaagcagcttcagagaaattcgtaaagttaagggaggtttacaacgttttgagcgacggagagagccgcagtttctacgactggacgctcgcacaagaggccgccagccgtaaagccgagaaactgaggatgagattggatgatccgtaccagcaagacgtgaggaactatgtaccgaaaccggataaggtcgaccgcctgggcggaaggaacatggagctgaacgatcaggctttgtcggccctcaccttcgatgctttcgtcataatctttgcgatttgttgcatcgtttatgtgcttgtgttcaaagaaccatattactagattgactgattctatacgtatatgttggcatatgtagctgaggagtttggaatggaagattctgagaatttgtacataatgttcattgaaatgaacctatagttgttaaaaaaaaaaaaaaaaaaaa

SEQ ID NO: 315 - protein, 257 aa, Gossypium hirsutum
  misc_feature: Ceres CLONE ID no.1849790
  misc_feature (114)..(180): Pfam Name. DnaJ Pfam Description. DnaJ domain
  misc_feature: The sequence is a funtional homolog of Ceres ANNOT ID no. 564261 at SEQ ID NO. 190 with e-value of 6.90E-75 and BLAST sequence identity of 62.0%
MASTSTLQAPYSLSLKPQNVTHLLHGSRAATTRARSRRRTYSGAAVFAATTGPSKPQRPPPGVDTRIHWDNEDEGWIGESSNSRQTKEKLNPEEEQKSLLGEKFADFLNDSSDSHYQFLGVSAEADLEDIKAAYRRLSKEYHPDTTSLPLKAASEKFVKLREVYNVLSDGESRSFYDWTLAQEAASRKAEKLRMRLDDPYQQDVRNYVPKPDKVDRLGGRNMELNDQALSALTFDAFVIIFAICCIVYVLVFKEPYY

SEQ ID NO: 316 - DNA, 951 bp, Panicum virgatum
  misc_feature: Ceres CLONE ID no.1795526
  misc_feature: The sequence encodes the protein given in SEQ ID NO 317
aatactcccctgccgcagacactgccacgcacattcccccatggcggcagccacggcctcgcgccccctcacgcccctcctccaccggcaccacccccgcagccggcggcgcgcgagcgccgtcgtcattgccgccgcgagcgcgccggacgccgagccgacggccgcagccggggcggccgcggggcaggagaagaagaagacggtggacacgaggatacactggtccgacccggaggaagggtggatcggtggcaaggccaagaaggacggcgctggcggccgtagcaagaacgagccgctgggagggaggttcgccgacctcatcagcgccgcttccgagtctcactatcagttcctggggattgctccagaggcggacatcgaggagatcaaggcggcgtaccggcggctgtccaaggagtaccacccagacacgacgactctgccgctcaaggtggcgtcggagaagttcatccgcctccgggaggtgtacaacgtgctgagcaaggaggaaagccggcggttctacgactggacgctggcgcaggaggccgagagccggcggctgcagcagatgaggtccaggctcgagaacccctacgagcaggacatacagaactacgagtccgtgccagacatggtcgaccgactcggcggcagaaacatgaagctcagcgaccaggccatgaccgccctcaccatcgatttcgtcatcatcatcatctccgtcatctgcatcatctacgccgtgttcttcaaggagcagtactgacagcagcgtattaacagcagcaaggttgaaggagtgtaccatatacagaacaatattcctaggtaaattaaatgataatacctcaagactgtctttacagatgttgttcatatacagtgtcatgatgttatgtcaaatagggcaagagcaacaaataaaaaaaaaaaaaaaaaaaa

SEQ ID NO: 317 - protein, 244 aa, Panicum virgatum
  misc_feature: Ceres CLONE ID no.1795526
  misc_feature (102)..(168): Pfam Name. DnaJ Pfam Description. DnaJ domain
  misc_feature: The sequence is a funtional homolog of Ceres ANNOT ID no. 564261 at SEQ ID NO. 190 with e-value of 2.49E-63 and BLAST sequence identity of 60.6%
MAAATASRPLTPLLHRHHPRSRRRASAVVIAAASAPDAEPTAAAGAAAGQEKKKTVDTRIHWSDPEEGWIGGKAKKDGAGGRSKNEPLGGRFADLISAASESHYQFLGIAPEADIEEIKAAYRRLSKEYHPDTTTLPLKVASEKFIRLREVYNVLSKEESRRFYDWTLAQEAESRRLQQMRSRLENPYEQDIQNYESVPDMVDRLGGRNMKLSDQAMTALTIDFVIIIISVICIIYAVFFKEQY

SEQ ID NO: 318 - protein, 127 aa, Pisum sativum
  misc_feature: Public GI ID no.1617206
  misc_feature (58)..(127): Pfam Name. CP12 Pfam Description. CP12 domain
  misc_feature: The sequence is a funtional homolog of Ceres CLONE ID no. 2721 at SEQ ID NO. 203 with e-value of 2.80E-32 and BLAST sequence identity of 64.2%
MATISGLSLSNPRLLFNSPGFPQTIKISSASPLSTRQTLTGSGRMKIVQPVRAAPEQISKKVEESIKSAQETCADDPVSGECVAAWDEVEELSAAASHARDRKKESDPLEDYCKDNPETDECKTYDN

SEQ ID NO: 319 - DNA, 559 bp, Gossypium hirsutum
  misc_feature: Ceres CLONE ID no.1808894
  misc_feature: The sequence encodes the protein given in 320
attacatcatttccactcataatatccaaacacagtaacattaccaatggcaaccctgtctagcgtgaacctcgtaaccccaagaatcatagccaatggaccagacgtcccaaccgtcaaggtcccatgccttaaccggccttggaaaagggtatccccaatgaagctgcgtgtcgggcctgttagagctgcaccggatggaatatcggagaaggtggagaaaagcataaaagaggcacaagagatgtgttcggatgatccggcgagtggcgagtgtgtggcggcttgggacgaagtggaagagctgagtgcggcggctagccacgctagggacaagaagaaagacgatgatcctttggagaattactgtaaagacaacccggagacggatgagtgtcgtacttatgataattgaaaatgtttgttttttctagtttcttagattatagttggatgttaatctgaaatatattttattgttggtttatatagtttgttataatgatgtaatcctaaaattatacactcctagaaaagaaaatgatatcaattaattcgg

SEQ ID NO: 320 - protein, 122 aa, Gossypium hirsutum
  misc_feature: Ceres CLONE ID no.1808894
  misc_feature (53)..(122): Pfam Name. CP12 Pfam Description. CP12 domain
  misc_feature: The sequence is a funtional homolog of Ceres CLONE ID no. 2721 at SEQ ID NO. 203 with e-value of 2.40E-33 and BLAST sequence identity of 63.1%
MATLSSVNLVTPRIIANGPDVPTVKVPCLNRPWKRVSPMKLRVGPVRAAPDGISEKVEKSIKEAQEMCSDDPASGECVAAWDEVEELSAAASHARDKKKDDDPLENYCKDNPETDECRTYDN

SEQ ID NO: 321 - protein, 132 aa, Nicotiana tabacum
  misc_feature: Public GI ID no.1617197
  misc_feature (62)..(132): Pfam Name. CP12 Pfam Description. CP12 domain
  misc_feature: The sequence is a funtional homolog of Ceres CLONE ID no. 2721 at SEQ ID NO. 203 with e-value of 4.60E-30 and BLAST sequence identity of 57.3%
MASIAGVSITTPRILSKTSDSPKVQTLKFQSLNKPWKNSSLVQFGHGKLYLKAISATPDNKLSDLVAESVKEAEEACAENPVSGECAAAWDVVEEASAAASHARDKKKESSDPLENYCKDNPETDECRTYDN

SEQ ID NO: 322 - DNA, 484 bp, Brassica napus
  misc_feature: Ceres CLONE ID no.959117
  misc_feature: The sequence encodes the protein given in SEQ ID NO 323
attattgtcgtcgtctctttcttcacactctctcgccaagccattgtttgtagatccgctttttccaattcctaaatcgagaaccgatacgtaagagatcaaacaaagggttaatcatggcaaaccagaaaggcgctctcgagggattctacagactcatcatgcgccgtaactccgtctacgtctccttcatcatcgccggcgctttcttcggcgaaagggctgtggattacggtgttcataagctctgggaaagcaagaatgttgggaaacggtatgaagacatatctgtgttgggtcaaaggccagttgaagagtgagagttctcctttttaaatctctccttactaaaagaaagaaatggaattttccattgttgtttttttcactcagaagtctccatctttwgttcaataaatctttgctatgattttccatattttccacctaaaccgctatttggttctgattagctgattttttg

SEQ ID NO: 323 - protein, 67 aa, Brassica napus
  misc_feature: Ceres CLONE ID no.959117
  misc_feature (8)..(64): Pfam Name. UCR_UQCRX_QCR9 Pfam Description. Ubiquinol-cytochrome C reductase, UQCRX/QCR9 like
  misc_feature: The sequence is a funtional homolog of Ceres CLONE ID no. 30018 at SEQ ID NO. 216 with e-value of 2.59E-27 and BLAST sequence identity of 92.3%
MANQKGALEGFYRLIMRRNSVYVSFIIAGAFFGERAVDYGVHKLWESKNVGKRYEDISVLGQRPVEE

SEQ ID NO: 324 - DNA, 414 bp, Brassica napus
  misc_feature: Ceres CLONE ID no.1090391
  misc_feature: The sequence encodes the protein given in SEQ ID NO 325
agattattcccatcgtctctttcttcaccctctcgccattgtttgtagatccgctttttccagaccctaaatcgagcaccgatacgtaagagatcaaacaaagggttaatcatggcaaaccagaaaggcgctctcgagggattctacagactcatcatgcgccgtaactccgtctacgtctcattcatcatcgccggcgctttcttcggcgaaagggctgtggattacggtgttcataagctctgggaaagcaagaatattgggaaacggtatgaagacatatctgtgttgggtcaaaggccagttgaagaatgagagttctcctttttaaatctctgcttactaaaagaaagaaatggaattttctattgttgttttttcactcagaagtctccatcttttgttcaatwaatc

SEQ ID NO: 325 - protein, 67 aa, Brassica napus
  misc_feature: Ceres CLONE ID no.1090391
  misc_feature (8)..(64): Pfam Name. UCR_UQCRX_QCR9 Pfam Description. Ubiquinol-cytochrome C reductase, UQCRX/QCR9 like
  misc_feature: The sequence is a funtional homolog of Ceres CLONE ID no. 30018 at SEQ ID NO. 216 with e-value of 3.40E-27 and BLAST sequence identity of 90.7%
MANQKGALEGFYRLIMRRNSVYVSFIIAGAFFGERAVDYGVHKLWESKNIGKRYEDISVLGQRPVEE

SEQ ID NO: 326 - DNA, 441 bp, Brassica napus
  misc_feature: Ceres CLONE ID no.1270157
  misc_feature: The sequence encodes the protein given in 327
cccgattagtcgcgcaaatctcgtcgtctttcttcagtctctcgctctccatttgtttgtagatccgctcgcgttttcaatccagaaccgatacgtacctgaatagagacagagatggcacttctcgagggattttacagagtcatcatgcgccgtaactccgtctacgtctccttcatcatcgccggcgctttcttcggcgaaagggctgtggattatggtgttcataagctctgggaaagcaaaaacgttgggaaacggtatgaagacatctctgtgttgggtcaaaggcctattgaagaatgagatttctcctttgttgttgttttgcacttacaagtctctctttctttgttgaataaaatcattgggatgatggttttcatatactttcacctaaacctgctatttgattctgattaattaaaagtttttttttgc

SEQ ID NO: 327 - protein, 63 aa, Brassica napus
  misc_feature: Ceres CLONE ID no.1270157
  misc_feature (4)..(60): Pfam Name. UCR_UQCRX_QCR9 Pfam Description. Ubiquinol-cytochrome C reductase, UQCRX/QCR9 like
  misc_feature: The sequence is a funtional homolog of Ceres CLONE ID no. 30018 at SEQ ID NO. 216 with e-value of 4.00E-24 and BLAST sequence identity of 89.8%
MALLEGFYRVIMRRNSVYVSFIIAGAFFGERAVDYGVHKLWESKNVGKRYEDISVLGQRPIEE

SEQ ID NO: 328 - DNA, 556 bp, Gossypium hirsutum
  misc_feature: Ceres CLONE ID no.1797853
  misc_feature: The sequence encodes the protein given in SEQ ID NO 329
cttctctacaggccctaatcgcagatcccagcaagagccacactctctcaagaatcgccatggactacgcttctcgaagaagtcaaggaggcctattcgaaggtctctacagagtcatcatgcgccgtaactccgtctacgtcacatttgtcatcgccggcgctttcctcggagaacgggctgtggattatggagttcataagctctgggaatacaacaatgttgggaagcgatacgaagacatttctgtgctaggacagaggcaatcagaggaatgaactcatccttttctttctctttttggatgttttgaagtttttatttgaggaatgggtatgagcatatatctatgatgtagcaatgctcattgttgcaataaaatgtcacttcttttttttttttttttggggggggggggaacgtacatctttattaacaatgagtcgattgattgtctttgaaagtattgaatgattcagaatcgtggattatatgcaatgtttactcatctactcattgcatcmccaatatataccagatttggatatcttgaact

SEQ ID NO: 329 - protein, 72 aa, Gossypium hirsutum
  misc_feature: Ceres CLONE ID no.1797853
  misc_feature (13)..(69): Pfam Name. UCR_UQCRX_QCR9 Pfam Description. Ubiquinol-cytochrome C reductase, UQCRX/QCR9 like
  misc_feature: The sequence is a funtional homolog of Ceres CLONE ID no. 30018 at SEQ ID NO. 216 with e-value of 5.50E-27 and BLAST sequence identity of 81.9%
MDYASRRSQGGLFEGLYRVIMRRNSVYVTFVIAGAFLGERAVDYGVHKLWEYNNVGKRYEDISVLGQRQSEE

SEQ ID NO: 330 - DNA, 399 bp, Papaver somniferum
  misc_feature: Ceres CLONE ID no.1620853
  misc_feature: The sequence encodes the protein given in SEQ ID NO 331
atttcatcgttcttcaaagaaaacctaagtttatttcagagagcagagaaaaatttagaaaaacatggaaagcatcttgaagaaaccagctccaaaaactggaggcttctatgaatctgcatataaactgtttatgcgtcggaattctgtatacgtaactgtgattatacttggtgcttttgctggtgaaagggcagttgattatggagtgaagacgctctgggaaaacaacaacaaagggaagcgctacgaggatatttccgtcctgggacaaagacctgttgaagaatgagtcccctttcccctctgttttctgggtttcatgtgctagaactgaagacataatgaagacttttgtgctggcgaaaacatttttatttctcttttgctgttttcact

SEQ ID NO: 331 - protein, 75 aa, Papaver somniferum
  misc_feature: Ceres CLONE ID no.1620853
  misc_feature (16)..(72): Pfam Name. UCR_UQCRX_QCR9 Pfam Description. Ubiquinol-cytochrome C reductase, UQCRX/QCR9 like
  misc_feature: The sequence is a funtional homolog of Ceres CLONE ID no. 30018 at SEQ ID NO. 216 with e-value of 1.59E-20 and BLAST sequence identity of 80.6%
MESILKKPAPKTGGFYESAYKLFMRRNSVYVTVIILGAFAGERAVDYGVKTLWENNNKGKRYEDISVLGQRPVEE

SEQ ID NO: 332 - protein, 72 aa, Medicago truncatula
  misc_feature: Public GI ID no.92867670
  misc_feature (13)..(69): Pfam Name. UCR_UQCRX_QCR9 Pfam Description. Ubiquinol-cytochrome C reductase, UQCRX/QCR9 like
  misc_feature: The sequence is a funtional homolog of Ceres CLONE ID no. 30018 at SEQ ID NO. 216 with e-value of 3.89E-26 and BLAST sequence identity of 80.5%
MESAAKRRGGGVLEGLYKVLMRRNSVYVTFVIAGAFLGERAVDYGVHKLWEINNVGKRYEDISVLGQRPVDE

SEQ ID NO: 333 - DNA, 571 bp, Panicum virgatum
  misc_feature: Ceres CLONE ID no.1955598
  misc_feature: The sequence encodes the protein given in SEQ ID NO 334
aagccacgcgttactgacgtcaagcgccgccccctcctcccattcctctgcggctctgcctgctcggatccacctccacctctcgcgcccgccgccgccgccgccgtcgccgcgatgggcctcttcgacgcgctctaccgcgtggtgatgcgccgcaacgccgtctacgtcaccttcgtcgtcgccggcgccttcgcgggcgagagggcggtggattacggagtccacaagctctgggagatgaacaacgtcgggaaaaggtatgaagatataccagttctggggcaaaggccagctgaagaatgagagcattggagctcagactacccaggatgtcgctttccatgaaattagattccatttaagcaatggtttatcattcctttttgacataataacaaccaatgtaaaatccaaactctttccgggagttgctacccgttcaattactcagcaggctgttggagtttcctgatgcatggttagaacctgttatctagccaggcatcggcatgtttggcatgtttggtcgaaaacttgaaatgccatgaatgagaaatgttttgttggc

SEQ ID NO: 334 - protein, 63 aa, Panicum virgatum
  misc_feature: Ceres CLONE ID no.1955598
  misc_feature (4)..(60): Pfam Name. UCR_UQCRX_QCR9 Pfam Description. Ubiquinol-cytochrome C reductase, UQCRX/QCR9 like
  misc_feature: The sequence is a funtional homolog of Ceres CLONE ID no. 30018 at SEQ ID NO. 216 with e-value of 1.99E-22 and BLAST sequence identity of 77.4%
MGLFDALYRVVMRRNAVYVTFVVAGAFAGERAVDYGVHKLWEMNNVGKRYEDIPVLGQRPAEE

SEQ ID NO: 335 - protein, 72 aa, Solanum tuberosum; identical to SEQ ID NO: 221
  misc_feature: Public GI ID no.1174870
  misc_feature (13)..(69): Pfam Name. UCR_UQCRX_QCR9 Pfam Description. Ubiquinol-cytochrome C reductase, UQCRX/QCR9 like
  misc_feature: The sequence is a funtional homolog of Ceres CLONE ID no. 30018 at SEQ ID NO. 216 with e-value of 1.89E-24 and BLAST sequence identity of 76.3%

SEQ ID NO: 336 - DNA, 467 bp, Musa acuminata
  misc_feature: Ceres CLONE ID no.1739308
  misc_feature: The sequence encodes the protein given in SEQ ID NO 337
gattgcaagctcgaccctcgatttgagcccatggattcgacggcggtgaggagaggtcgcggtgggggcgtgtgggagggactttaccgcctcctcatgcgacgcaactccgtctacgtcaccttcgtcgtcgctggtgccttcgttggagaacgggtcgtcgattatggtgttcacaagctttgggattataataatgcagggaagaagtatgaggatattccagtactgggacaaagacaatcagaatgatgtttcaagctgcaattccttttccacaatcttcaagcttatgtgcacttgagcttcctagaacttcttatcttggtctttcgataacatgccataagctgtttactgttactatcaatttttttgaagacagctccgtgattgttcttttgagctgcaaactgccacactatttttcttctgcgccaatgtgatcttaatgacttttttctttc

SEQ ID NO: 337 - protein, 73 aa, Musa acuminata
  misc_feature: Ceres CLONE ID no.1739308
  misc_feature (15)..(71): Pfam Name. UCR_UQCRX_QCR9 Pfam Description. Ubiquinol-cytochrome C reductase, UQCRX/QCR9 like
  misc_feature: The sequence is a funtional homolog of Ceres CLONE ID no. 30018 at SEQ ID NO. 216 with e-value of 7.70E-21 and BLAST sequence identity of 70.5%
MDSTAVRRGRGGGVWEGLYRLLMRRNSVYVTFVVAGAFVGERVVDYGVHKLWDYNNAGKKYEDIPVLGQRQSE

SEQ ID NO: 338 - protein, 473 aa, Citrus sinensis
  misc_feature: Public GI ID no.70609692
  misc_feature (213)..(469): Pfam Name. p450 Pfam Description. Cytochrome P450
  misc_feature: The sequence is a funtional homolog of Ceres CLONE ID no. 36334 at SEQ ID NO. 229 with e-value of 4.89E-200 and BLAST sequence identity of 80.3%
MAGLTLVYDLVLYISISTVIFFIIKRSRSRRLRLPPGSLGLPFLGETLQLIAAYKTENPEPFIDVRVKRFGSIFTTHIFGEPTVFSADPETNRFILQNEGKSFECSYPGSVSNLLGKHSLLLMKGSLHKRMHSLTMTFANSSIIRDHLLVVIDRLVRLHMDSWTDRVLLMEEAKKITFELTVKQLMSFDPNEWTESLRKEYVLVIEGFFTVPLPIFSTTYRRAIQARTKVAEALSLVVRQRRKESEPGERKNDMLEALLAGDDGFSDEEIVDFLVALLVAGYETTSTIMTLAVKFLTETPLALAQLKEEHDEIRAKKSKQEPLEWNDYKSMPFTQCVVNETLRVANIISGVFRRAMTDINIKGYTIPKGWRVFASFRAVHLDHDHFKDARSFNPWRWQNNSGATSPVNVSTSFGGGPRLCPGYELARVELSVFLHHLVTRFSWVPAEQDKLVFFPTTRTQKRNPIIVQRRNEN

SEQ ID NO: 339 - DNA, 1834 bp, Panicum virgatum
  misc_feature: Ceres CLONE ID no.1786280
  misc_feature: The sequence encodes the protein given in SEQ ID NO 340
aagccaaaccgcacacggccacgccgcccatggacgcgagcggggcgccgccgcccctcctggccgtgtcctccttcgccgcggccgcgctgctcttcgccgcggtgctggggtggctcttcgccgcgcggtcgtccaagcgcgggtcggcgcggctgccgccgggcagcacggggctgccgctcatcggggagacgctgcgcctcatctccgcctacaagacccccaacccggagcccttcatcgacgaccgcgtggcgcgccacggcagcggcgtcttcaccacccacatcttcggcgagcgcaccgtcttctccgccgacccggccttcaaccgcctcctcctcgccgccgagggccgcgccgtcggctgcagctacccgtcctccatcgccacgctgctcggcccgcactcgctgctcctcaccaggggccccgcgcaccgccgcctccacacgctcacgctcacccgcctcggccgccccgcgtcgccgccgctcctcgcctacatcgaccgcctcgtcctcgccaccatgcgggagtgggagcccgccgccaccgtccgcctcctcgacgaggccaagaagatcaccttcaacctcaccgtcaagcagctcgtcagcatcgaccccggcccgtggaccgagagcgtccgccgcgagtacgtcaagctcatcgacggcttcttctccatcccgttccccttcgcccacctccttcctttcaccacctacggccaggccctcaaggcgaggaagaaggtggccggggctctgcgggaggtgataaggaagaggatggacgacaagctggaaaatggttgcgcgaacgggaaggaggatgacaagattgagaagaaggacatggtggaggagcttcttgaagcagagggtgggagcttctccgaggaggaaatggtggatttctgcctgtctctgctggtggctggctacgagacgacgtccgtgctcatgacgcttgctgtcaagttcctcaccgagacacccactgcgctggcgcagctcaaggaagagcatgaaaatatcagagacgtaaaaggcaaaaatcaacctctggaatggagcgatttcaagtcaatgccatttacacaatgtgtgataaatgaaacattgcgtgttgctaacttaattagtggggtattcaggcgtgcaaacactgatattcattttaaagactacgttattccaaagggctgcaaaatatttgcttcattccgagctgtgcaccttaatactgaacactatgagaatgctcggacctttgatccctggagatggcagagtaagaataaactccagaacgcagtaggggccagcttgtttactccctttggtggcggacctcgtctgtgcccaggctatgagcttgcccgggttgttgtttctgtttttctccatcatcttgtgacacgctttagttgggaagaagctgaggaagataggattgtcttcttccccaccacccgaactctcaaaggataccccatcaatctccggcggcgaccagattctgttttctgacctcgcattaggttccagttacccttatggtctaagcaagagtaagcatagataagaaaaatgtccccagtagtcagtgaaattttatctgtaatttggcgcagaaagcagtcggcaaacttgtttttgcttgtaaaatgacccaaactgctatgcaatgcgtactggttacagataacattttgccgtgtattatttggctatcctaagatccagcaaagatcttgctagtcgttatatcgctgtcctaacaattgacaaatgatgtgatgattttgtacgatttggtgggc

SEQ ID NO: 340 - protein, 503 aa, Panicum virgatum
  misc_feature: Ceres CLONE ID no.1786280
  misc_feature (232)..(497): Pfam Name. p450 Pfam Description. Cytochrome P450
  misc_feature: The sequence is a funtional homolog of Ceres CLONE ID no. 36334 at SEQ ID NO. 229 with e-value of 7.19E-144 and BLAST sequence identity of 62.1%
MDASGAPPPLLAVSSFAAAALLFAAVLGWLFAARSSKRGSARLPPGSTGLPLIGETLRLISAYKTPNPEPFIDDRVARHGSGVFTTHIFGERTVFSADPAFNRLLLAAEGRAVGCSYPSSIATLLGPHSLLLTRGPAHRRLHTLTLTRLGRPASPPLLAYIDRLVLATMREWEPAATVRLLDEAKKITFNLTVKQLVSIDPGPWTESVRREYVKLIDGFFSIPFPFAHLLPFTTYGQALKARKKVAGALREVIRKRMDDKLENGCANGKEDDKIEKKDMVEELLEAEGGSFSEEEMVDFCLSLLVAGYETTSVLMTLAVKFLTETPTALAQLKEEHENIRDVKGKNQPLEWSDFKSMPFTQCVINETLRVANLISGVFRRANTDIHFKDYVIPKGCKIFASFRAVHLNTEHYENARTFDPWRWQSKNKLQNAVGASLFTPFGGGPRLCPGYELARVVVSVFLHHLVTRFSWEEAEEDRIVFFPTTRTLKGYPINLRRRPDSVF

SEQ ID NO: 341 - protein, 282 aa, Mesembryanthemum crystallinum; identical to SEQ ID NO: 83
  misc_feature: Public GI ID no.7528276
  misc_feature (136)..(200): Pfam Name. AP2 Pfam Description. AP2 domain
  misc_feature: The sequence is a funtional homolog of Ceres CLONE ID no. 625035 at SEQ ID NO. 82 with e-value of 1.70E-73 and BLAST sequence identity of 71.4%

SEQ ID NO: 342 - DNA, 1741 bp, Gossypium hirsutum
  misc_feature: Ceres CLONE ID no.1926437
  misc_feature: The sequence encodes the protein given in SEQ ID NO 343
aaaagattcagactcctaacttctcacatttcttctcttttattctttaattcattcatttttttcctaaaaaaaaacaaaacaaaaccaaccccaaattcctcaatcaattactcaagatttaacaggtttcgttatggagatgcatccgagtagcaacgagaccgatttagcaatgttggactcaattcggcgacacttactcggggagtcatcagacttccgattcgatgcttccgttgattgtaccactaccacggctccccccgtgttttgcagaagctcaagcttcaaccgcttgtacccatgtttggctgaaacctggggtgaccttcctcttaaagaaaacgattctgaagatatgctcgtttttgagttcctccgagatgctttaaccgtaggctgggcgccctccgataactcttctatcaaatatacgccgattaaaccggagccgcaggagattttagttgaggctccagctgcgaatacggttgttcccgcggtggttccgaccaaagcgaggcattacagaggagttaggcaaaggccgtgggggaagttcgcagctgagataagggacccggctaaaaatggggctcgggtttggttaggtacttttgaaacagctgaggatgcggctttggcttatgataaagcagcttataggatgcgcgggtccaaggctttgttgaatttcccattgagggtgaattccggggagcctgacccagtgagggtaacgtcaaagagagcatcacccgagccgtccaatttttcatcatccggctcagagcaggggttaccgaaaaggaggagaaaggtggctccctcagctccggttgtgggtgaagcctggttagatatgagttcagcagctgcagttgagtatgaaattggatcacgtactaacagcaatcaactattaatcagctaatggattaatgaaagaagcagggaaaatgagggtctgaaatatttgtaaacttgtgttggctttgtgcatacaaagaaattgatattatttcatggttgtttcgctaaatgagaaaattttattctttaataaaaaatgatgtaagcaatatggttgaaaatggacattccaatgcagcaagatactgtaaaaacctagttttgatgtaggaagaagcatacaatcaaaatgtagatgtaggcgttggtatctcagccatttgaagatgacaaatccagaccagcttggcgttaggcctataataaaaggtagctgctcttctttctaacatgtgtttattttaccaatattctagaacatatggcgtcaagctgaaggaacaaggacgcacgtacacgaacgttgcgcggttagaaaaggacagttgacttttgggcaaagatggaatagctttatcctctatccaaacactaattgcttttttgaccttatacattcaaactgtttgacttttcagacttttcttccgacttctaaccaccaggattctttgttcacaatgagaaaaatgttttcacattgagtttggaaaggagatatgtttgagagtataggtgggtgggaatttgattggttgttgttttctattgattttctacaactacataattcatttggatttcataaaataacttctcgacgtcacccgctcgcttatgggaaaggaatcctcctacatgggatttcatttagatcaaatttgatcaaagctcaaatcaacatctacatgtcgaagcaaaaaac

SEQ ID NO: 343 - protein, 266 aa, Gossypium hirsutum
  misc_feature: Ceres CLONE ID no.1926437
  misc_feature (130)..(194): Pfam Name. AP2 Pfam Description. AP2 domain
  misc_feature: The sequence is a funtional homolog of Ceres CLONE ID no. 625035 at SEQ ID NO. 82 with e-value of 2.19E-69 and BLAST sequence identity of 69.7%
MEMHPSSNETDLAMLDSIRRHLLGESSDFRFDASVDCTTTTAPPVFCRSSSFNRLYPCLAETWGDLPLKENDSEDMLVFEFLRDALTVGWAPSDNSSIKYTPIKPEPQEILVEAPAANTVVPAVVPTKARHYRGVRQRPWGKFAAEIRDPAKNGARVWLGTFETAEDAALAYDKAAYRMRGSKALLNFPLRVNSGEPDPVRVTSKRASPEPSNFSSSGSEQGLPKRRRKVAPSAPVVGEAWLDMSSAAAVEYEIGSRTNSNQLLIS

SEQ ID NO: 344 - protein, 330 aa, Gossypium barbadense; identical to SEQ ID NO: 98
  misc_feature: Public GI ID no.33469564
  misc_feature (143)..(166): Pfam Name. LRR_1 Pfam Description. Leucine Rich Repeat
  misc_feature: The sequence is a funtional homolog of Ceres CLONE ID no. 5344 at SEQ ID NO. 87 with e-value of 7.79E-115 and BLAST sequence identity of 69.0%

SEQ ID NO: 345 - DNA, 1139 bp, Panicum virgatum
  misc_feature: Ceres CLONE ID no.1820701
  misc_feature: The sequence encodes the protein given in SEQ ID NO 346
attgcatccaagcccgactaggccacgataagcaagatggcgacaaagacgcgcggcgccttcaaccacgtcgtcctgctcctcgcggcgacgtccctcctcgccaccgccgccagcaaggaccgctgccactccggcgacaaggccgcgctgctggccgtcaaggcggcgctcggcaacccctttccgtcctggacgcccgactccccgtgctgcgactggtacgacgtcgactgcgactactccaccggccgcgtcgtcggcctctccgtgttccaggacgccaacctcaccggcgccatccccgacgccgtcgccggcctcgcccacctccagagcctcatgtggcaccacctccccgcgctctccggccccatcccgccggccatcgccaagctctccaacctctcgcagctcatcatctcctggaccgccgtctccgggcccgtgccgtccttcctgggcgcgctcaccaagctcacgctgctcgacctctccttcaactccctcacgggcgccgtcccggcgtcgctcgccgccctccccaacctctccggcatcaacctcagccgcaaccgcctcaccggcgccatccctccgctgctcctcagcaagtcccccgaccaggcctacctcttgctgtcgcacaacaacatgtccggcgccatccccgccggcttcgccgccgtcaacttcgcgcacctcgacctgtcgcgcaacgccttcgcgggcgacgcgtcggggctcttcggccggggcaaggagcttcagtacctggacctgtcgcgcaacgccttcagcttcaacctctccggcgtggggctgccggagcagctctacttcgtggacgtgagccacaacgccatctccggcggcatcccggcggaggtggccaacctcaccaacctgcagttcttcaacgtcagctacaaccggctctgcggcgcggtgcccaccggcggccacatggagagatttgacctcttcagcttccagcataacaagtgcctctgtggaactccgcttgctaacccctgcaactgacgacagaccaacagatgaaataaaatcactgacaatatcataaattcagtgatacttatggattaaattttatttaaaaaaaaaaaaaaaaaaaa

SEQ ID NO: 346 - protein, 335 aa, Panicum virgatum
  misc_feature: Ceres CLONE ID no.1820701
  misc_feature (147)..(170): Pfam Name. LRR_1 Pfam Description. Leucine Rich Repeat
  misc_feature: The sequence is a funtional homolog of Ceres CLONE ID no. 5344 at SEQ ID NO. 87 with e-value of 5.60E-73 and BLAST sequence identity of 47.1%
MATKTRGAFNHVVLLLAATSLLATAASKDRCHSGDKAALLAVKAALGNPFPSWTPDSPCCDWYDVDCDYSTGRVVGLSVFQDANLTGAIPDAVAGLAHLQSLMWHHLPALSGPIPPAIAKLSNLSQLIISWTAVSGPVPSFLGALTKLTLLDLSFNSLTGAVPASLAALPNLSGINLSRNRLTGAIPPLLLSKSPDQAYLLLSHNNMSGAIPAGFAAVNFAHLDLSRNAFAGDASGLFGRGKELQYLDLSRNAFSFNLSGVGLPEQLYFVDVSHNAISGGIPAEVANLTNLQFFNVSYNRLCGAVPTGGHMERFDLFSFQHNKCLCGTPLANPCN

SEQ ID NO: 347 - DNA, 1450 bp, Panicum virgatum
  misc_feature: Ceres CLONE ID no.1817099
  misc_feature: The sequence encodes the protein given in SEQ ID NO 348
agcacccggattacaaacccaccggcgagcggcgaaatcggaggcgactcgccgagggttcccggtcctccgctctctcgccggctcctctaccgcggccgcaactcgccggcggcagccggcgggacgctgcggtccagcgcccccctccccccggaagcctcttcggtctccttcgctaatcgggaggcgtcgaccccgccgcggctccccgccccgcgcccgccgccgaactctactagcgctgggctggcgcggattggagcggagatcggctccgtgccatgttggtgaagatgcattacgtgtagatcaagctccaatctgatggattctgatgaaaagaagtttggaaaagggcctagggagctttctggtgctgttgatttaatcaaccactacaaactgctcccgcaccatgatttcttttgcaagaaacctttgccactggcaatctcagatacacattatcttcataatgtcgtgggagacactgaaattcgcaaaggagaaggaatggagctggatcaacttgttcagaatgcatctacgaggaataagcctgcttttattcagccctttgatatggaaatactggggcaagcattccagcttcgagaaacagctccagtagatttgccctctgctgaaaagggtatacctactatttctggtaagccaaaaagtgagtccaaggacaaagagaagaaacataaaaaacacaaagacagggataaagataaggagcataagaagcataaacatcggcataaagaccggagtaaggataaagataaagacaaggacaaagataagaaaaaggataaaagtgggcatcatgattctggcggcgatcattcaaagaagcatcatgataagaagaggaagcatgagggaatggaggactcggcggatgtgcataagcacaagaagagtaagcacaagagttccaaaaccgatgaaatggggaatggacttagttaactacacttcctagttctagtcttcaatccttgtaacttgctgttaaaaggaaactccgatggtttctgtcatcaaaactctgcagaatggtggtatcattaccatgaactgaacctgtttgatgagaacaccataattgaggttgtcttgcagcatccattctgatgaaagttgtatttgttaatactaataggggactaatccattgtaccattgcgactttatgttcctccctgaagaataactggttgtaggaacacttgaaaggacttgcaacaagattgtttcgattactagggccagtgcacccttccaaaataggcttctaattgaactcgtgatgtagcatgagtacattgagtagtagtagtggacagatatagaatgtgcagcctagagatgtagctgagagcagggaatcaaagcatatttgtgtttcttgtgccaaaaaaaaaaaaaaaaaaaa

SEQ ID NO: 348 - protein, 218 aa, Panicum virgatum
  misc_feature: Ceres CLONE ID no.1817099
  misc_feature: The sequence is a funtional homolog of Ceres ANNOT ID no. 569483 at SEQ ID NO. 151 with e-value of 3.10E-79 and BLAST sequence identity of 72.4%
MDSDEKKFGKGPRELSGAVDLINHYKLLPHHDFFCKKPLPLAISDTHYLHNVVGDTEIRKGEGMELDQLVQNASTRNKPAFIQPFDMEILGQAFQLRETAPVDLPSAEKGIPTISGKPKSESKDKEKKHKKHKDRDKDKEHKKHKHRHKDRSKDKDKDKDKDKKKDKSGHHDSGGDHSKKHHDKKRKHEGMEDSADVHKHKKSKHKSSKTDEMGNGLS

SEQ ID NO: 349 - DNA, 1382 bp, Gossypium hirsutum
  misc_feature: Ceres CLONE ID no.1808214
  misc_feature: The sequence encodes the protein given in SEQ ID NO 350
cttggacaggaaaagaaaggaaaaaactcgtgtagtgttggtggttcgacccttttcaaaccctaaaaaagtagggacttaattgcttccattgcctgctcctgaaagctctccaacttcataagatcttacacattctaccccgcttcactccctcttcaattcgctctcttttatttcactggttttcttttacttgcattgaagcgtcaggaccgaatttatcaggggaggagaggagcttgaatttttatttttattttgctttgctttttctcttgatctgataaatgttcctcggcgactttgcccgagtccatgtttgaggaaattgcagttggtgacattccatgtttcatgaaccattaactcatggatgctggaggcaataaatttggaggaggaccaagggaacttagtggtgttgtcgatcttataagtcgatataagttgttgcctcaccatgacttcttctgcaagagacctcttcctttgtccattgcagacacacattatcttcataatgtggcgggagatactgaaattagaaaaggagaagggatgcaattggaccagcttaatcagaatacatcttataacagagatactaatttccgcatacaaccttttgactttgatattcttaaagaggcttttcagctgagagaaaccactcccgttgaattgccaccgactgaaaaagggatgcctactattgctgggaaatcaaagagtgaggtcaaagataaagagaggaagcataaaaagcacaaagatagagataaggagaaggataaagagcataagaagcacaagcaccgtcataaagataaagatcgaagtaaagataaagacaaggaaaagaagaaggatagaagtgggcattatgattctggtgctgatcacttaaaaaagcaccatgaaaagaaaaggaagcatgatggagatgaagatcgtaatgacattaacagacacaaaaaaagtaagagtaagcttgtaaattgactgaagaatgcgtagaaagtgaattctctgacggatatttcatgcaaggtataagtggctgaaaatggacccttttcttgtattataatagtgggtaatataattaagatagcatggaaaactttggatttttttttttaatatatagttcacgatgggatgactcttcatttacaacatgatgattgtagtcttagcgtgatttattttaatcattgtgatttagggattcggagtattttgtacgtaggaaagaataatgtcttaacatattctaatgggttcctgaaaagttgtaattgtaaggcacatgttatcacatcaatgtcaatccctttttttaccctttaattttcgaaaaaaaaaaaaaaaaaaaa

SEQ ID NO: 350 - protein, 210 aa, Gossypium hirsutum
  misc_feature: Ceres CLONE ID no.1808214
  misc_feature: The sequence is a funtional homolog of Ceres ANNOT ID no. 569483 at SEQ ID NO. 151 with e-value of 1.70E-78 and BLAST sequence identity of 71.9%
MDAGGNKFGGGPRELSGVVDLISRYKLLPHHDFFCKRPLPLSIADTHYLHNVAGDTEIRKGEGMQLDQLNQNTSYNRDTNFRIQPFDFDILKEAFQLRETTPVELPPTEKGMPTIAGKSKSEVKDKERKHKKHKDRDKEKDKEHKKHKHRHKDKDRSKDKDKEKKKDRSGHYDSGADHLKKHHEKKRKHDGDEDRNDINRHKKSKSKLVN

SEQ ID NO: 351 - DNA, 1436 bp, Gossypium hirsutum
  misc_feature: Ceres CLONE ID no.1870041
  misc_feature: The sequence encodes the protein given in SEQ ID NO 352
acgagctaaaactcccactacgaaggtttttgactctgtgacccccaaaaataataaaaataataagtaaataaataagccggagaagctacggacccgaggatttggccaggaaaagaaaggaaaaaactcgtatagtgttggtggttcgtcccttttcaaaccctaaaaaagtagggacttaattgcttccattgcctgctcctgaaagctctccaacttcataagatcttacccattctacccggcttcactccctcttcaattcgctctcttttattttcactggttttcttttacttgcattgaagcgtcaggaccgaatttatctgaggaagagaggagcttgaaattttcttttttgctttgctttttctcgcgatctgaaaaatgttcctcggcgactttgcccgagtccatgtttgaggaaattgcagttggtgacattacacgtttcatgaaccattaactcatggatgctggaggcaataaatttggaggaggaccaagggaacttagtggtgttgtcgatcttataagtcgatataagttgttgcctcaccatgacttcttctgcaagagacctcttcctttgtccattgcagacacacattatcttcataatgtggcgggagatactgaaattagaaaaggagaagggatgcaattggaccagcttaatcagaatacatctcataacagagatactaatgcccgcatacaaccttttgactttgatattcttaaagaggcttttcagctgagagaaaccactcctgttgaattgccaccgactgaaaaagggatgcctactattgctgggaaatcaaagggtgaggttaaagataaagagaggaagcataaaaagcacaaagatagagataaggagaaggataaagagcgtaagaagcacaagcactgtcataaagataaagatcgaagtaaagataaagacaaggaaaagaagaaggatagaaatgggcatcatggttctggtgctgatcacttaaaaaagcaccatgaaaagaaaaggaagcatgatggagatgaagttcgtaatgacattaacagacacaaaaaaagtaagagtaagcttgtaaattgactgaagaatgcgtagaaagtgaattctctgattgatggatatttcatgcaaggtataagttgctgaaaatggacccttttcttgtattataatagtgggtaatataattaagatagcatgcaaaactttggattttttttttaatatatagttcgcgatgggatgactcttcatttacaacacgatggttgtagtcttagcgttgtacgtaggaaagaataatgtcttaacatattctaacgggttcctgaaaagttgtaattgtaaggcacatgttaacacatcaatgtcaatccctttttttatcctttaaaaaaaaaaaaaaaaaaaa

SEQ ID NO: 352 - protein, 210 aa, Gossypium hirsutum
  misc_feature: Ceres CLONE ID no.1870041
  misc_feature: The sequence is a funtional homolog of Ceres ANNOT ID no. 569483 at SEQ ID NO. 151 with e-value of 3.70E-76 and BLAST sequence identity of 70.9%
MDAGGNKFGGGPRELSGVVDLISRYKLLPHHDFFCKRPLPLSIADTHYLHNVAGDTEIRKGEGMQLDQLNQNTSHNRDTNARIQPFDFDILKEAFQLRETTPVELPPTEKGMPTIAGKSKGEVKDKERKHKKHKDRDKEKDKERKKHKHCHKDKDRSKDKDKEKKKDRNGHHGSGADHLKKHHEKKRKHDGDEVRNDINRHKKSKSKLVN

SEQ ID NO: 353 - protein, 220 aa, Oryza sativa subsp. japonica
  misc_feature: Public GI ID no.108862961
  misc_feature: The sequence is a funtional homolog of Ceres ANNOT ID no. 569483 at SEQ ID NO. 151 with e-value of 1.40E-78 and BLAST sequence identity of 69.2%
MDSDDKKFGKGPRELTGAVDLISHYKLLAHHDFFCKKPLPLAISDTHYLDNVVGDTEIRKGEGMELDQLVQNAYLRDKPAYIQPFDMETLGQAFQLRETAPVDLPSAEKGIPTISGKLKSESKDKEKKHKKHKDKDRDKDKEHKKHKHRHKDRSKDKDKDKDKDKKKDKSGHHDSGGDHSKKHHEKKRKHEGMEDSADVHKHKKSKHKSSRTDDTGNGLS

SEQ ID NO: 354 - DNA, 894 bp, Gossypium hirsutum
  misc_feature: Ceres CLONE ID no.1831965
  misc_feature: The sequence encodes the protein given in SEQ ID NO 355
atggatcgagtagaaccaccagacctcccctaaaaacaaaaaatccctaagtgccgctcaccacctccacctgtccagcgccgctgcccgacgacagccatctccactccggcggccgctttgtcttccgcttcttctgtcgccggcgcccatcaccgttgcgtcgtcccgctcgttcctccatcaaaacactttcgtcattccggtcaagctgctgtttcctctgttgccggcgttcatcactgccgtcgtcttctccgctgcagcattcagtcgtcgccgtcccgctgtgccgccggtcaatctcatccaattccgggtgattctagatgggagaggctcgggatggggtgaaggtaaagagagtggttttcgttacagtgggaacaacatgttttgatgcacttgttaaagtggcggattctcaggaagttaaggatgagttatatagaagagggtatactgatcttctcattcaaatgggtcgagggtcatatcttcctataaagtctactggtgatgatggatctttggctgtagactacttcacattttcatcgagcattgcggactatctgagatctgcatcgcttgtgatcagtcatgcaggttctgggagcatatttgagaccttgcagcttggcaaacctctaattgttgttgtcaatgaagatttgatggataatcatcagagtgagttagcagaagaactggcagagagaaaacatttatattgtgctcgtcctctgacactccaccaaactatagccggtatggatttgaattctcttgttccgtactctccgggagatgccacaccagtggccaaactgataaataggtttcttggctttccagaagagtcatgagcttgaaaaaaaaaaaaaaaaaaaa

SEQ ID NO: 355 - protein, 179 aa, Gossypium hirsutum
  misc_feature: Ceres CLONE ID no.1831965
  misc_feature (13)..(172): Pfam Name. Glyco_tran_28_C Pfam Description. Glycosyltransferase family 28 C-terminal domain
  misc_feature: The sequence is a funtional homolog of Ceres ANNOT ID no. 565281 at SEQ ID NO. 62 with e-value of 3.09E-63 and BLAST sequence identity of 75.1%
MGEARDGVKVKRVVFVTVGTTCFDALVKVADSQEVKDELYRRGYTDLLIQMGRGSYLPIKSTGDDGSLAVDYFTFSSSIADYLRSASLVISHAGSGSIFETLQLGKPLIVVVNEDLMDNHQSELAEELAERKHLYCARPLTLHQTIAGMDLNSLVPYSPGDATPVAKLINRFLGFPEES

SEQ ID NO: 356 - DNA, 1858 bp, Panicum virgatum
  misc_feature: Ceres CLONE ID no.1770078
  misc_feature: The sequence encodes the protein given in SEQ ID NO 357
atccgccgcctcgcccgagctgcgccgcggtcggagcagctccgccccgcttccacgcgcccccgtccgccgccggcggccgccgcatcggcccctcccctcccctgctcctccgcagctccgtcccgccaccgcgcaccgctgccttgagcttcccgcctggacgcattgtggatctcccgttggagaccaacgtttttgggtggtgccctttcagccccactaggactcaatttgggttttgggtctccaccaccgttggagatagccttactgatcccatagtccagcaggcagcagcctcgacgagtcgacgccagcgccggagagggaatccaacaaaccccgaaacgcgccgccgtcgccctcgccgctcggctgccccctcttcacttcttcagttccctccgcagccggctcgcaagagcaccccgcggcggtggagaggtaaatctcctccgggcgccagcggcggcggatcagtcgagggtattggagaagaaatgggaagcagagaaaggcgagtggtgtttgtcaccgtaggaactacatgcttcgatgctcttgtcaaggcagtagattccgaggaagtgaaagaagccttactgcgtaagggttacaccgatctcctgattcaaatgggccgaggcacatacatgccatgtaaggactcaggaaattcaactcttcaagttgattatttcaccttttcaccaagcattgctgactacataagagaagcatccttagtcatcagtcatgcaggatccggaagcatatttgagaccctacgactgggaaaacctctaattgttgttgtgaatgaagatcttatggataatcaccagagcgagttagcagaagaacttgccgacaggaagcaccttttctgtgcccgtccacaaacactgcaagagactgttgagtcgatggacctgaataatctcctgccttacatgccaggagatgccaatcaagttgtctcactggtcaacaaatttcttggttttccagtcgactgattgtctccatcattgcttactcatcatggaaatagagggatcttgtgcgctagtgatttagtcagaaagtgctgggagaatgtcagctctaagctaagagcattggactgcgcactgctttcatttgatcatgataagctgaaatgaactggccaaagaaccatgctgatatgaaatggccagtatggtggatggatcaactgaccctaacccagggtacggtgtgatctgttcttttggttctacaatcctggctcctgggagcaattgatgtagcttggtggaatcagcaaccttacctattgtttctattttgatatccttcatctaactacttaccatctctcagtacaagggaaatgtttcccaaattgcatgaaatgtgcttccccttttctttggtattggagggtgcataggtagctgctctccacaggattgggatccacttgaaggcatggtttcagttgcgatatatgaactcagtgctgcatcggagagttggtgaaagcaaacccatacgggccctttgattggtatttgctacattccagaatgtaactgatgtgaggatccatgtcattaaacagaagcattgtggttttgaccttgattgagggaagccccgtttagcaatcttgctgggatcaatatgccatatgctaccattatttcactcctttttggactccctgaaagccatcttggtgatgatgtgtgttgtactcctgcgctaccatcgatttccaaatttcagctttgttttaggggacaaactattagtagtggatgtttgagggaaactcactttactccaaaaaaaaaaaaaaaaaaaa

SEQ ID NO: 357 - protein, 172 aa, Panicum virgatum
  misc_feature: Ceres CLONE ID no.1770078
  misc_feature (8)..(166): Pfam Name. Glyco_tran_28_C Pfam Description. Glycosyltransferase family 28 C-terminal domain
  misc_feature: The sequence is a funtional homolog of Ceres ANNOT ID no. 565281 at SEQ ID NO. 62 with e-value of 6.60E-54 and BLAST sequence identity of 67.0%
MGSRERRVVFVTVGTTCFDALVKAVDSEEVKEALLRKGYTDLLIQMGRGTYMPCKDSGNSTLQVDYFTFSPSIADYIREASLVISHAGSGSIFETLRLGKPLIVVVNEDLMDNHQSELAEELADRKHLFCARPQTLQETVESMDLNNLLPYMPGDANQVVSLVNKFLGFPVD

SEQ ID NO: 358 - DNA, 687 bp, Panicum virgatum
  misc_feature: Ceres CLONE ID no.2008759
  misc_feature: The sequence encodes the protein given in SEQ ID NO 359
attgacagccctccccggctccccctcacggctcagggcctcagccctcgggctcatctctgtttctttcccccttcttctctgactctctccgtcctccttccctggcggcgccgactggtcgagcggcggcgcgcccttcgtcacctcctggcccagcccttcgccagcgacgagcatccaccagatggcagatagagagagacgaacagtgtttgtcactgtggggaccacatgttttgattctcttgtcatggcagtggattctccagaagtgaaaaaagctttgttgcaaaaaggttatactgaccttcttattcaaatgggccgagggacatacgttccatctaaggtgtcagaagatgcaacccttcaagttgatcatttcatgttttcaccaagcattgctgacaatatgagaacagcttccctagttattagccatgcaggttcaggaagtatattcgagacgctacgactcggcaaacctctaattgttgttgtaaatgaagatttgatggacaatcaccagagtgagctagcagaagagttggctgaaaggaagcacctcttctgtgcacacccacaaacactgggagagaccatcggagcaatggacctagggacactcgttccttatgtgccaggggatgccgaaccagttgtcaccctgatcaacaaatttct

SEQ ID NO: 359 - protein, 166 aa, Panicum virgatum
  misc_feature (1)..(166): Ceres CLONE ID no.2008759
  misc_feature (8)..(166): Pfam Name. Glyco_tran_28_C Pfam Description. Glycosyltransferase family 28 C-terminal domain
  misc_feature (1)..(166): The sequence is a funtional homolog of Ceres ANNOT ID no. 565281 at SEQ ID NO. 62 with e-value of 2.19E-48 and BLAST sequence identity of 65.2%
MADRERRTVFVTVGTTCFDSLVMAVDSPEVKKALLQKGYTDLLIQMGRGTYVPSKVSEDATLQVDHFMFSPSIADNMRTASLVISHAGSGSIFETLRLGKPLIVVVNEDLMDNHQSELAEELAERKHLFCAHPQTLGETIGAMDLGTLVPYVPGDAEPVVTLINKF

SEQ ID NO: 360 - protein, 167 aa, Arabidopsis thaliana
  misc_feature: LOCUS ID no. At2g26210
  misc_feature: Ceres SEED LINE ME11273
  misc_feature: Ceres ANNOT ID no. 828248_T
MGLGGSETMECKCGMPLCICVAPPKSTDKPNPPATIAPVVLPQLKSEASAKSKGSTSSSNARSALNAGLDTPQRDYEASGEGLREAIKNGDSAGAKKLLKEGVDANYRDRQGMSVLHLAVLFNQTDIALMLMDHGASLEYKNAQGETPLDCAPATLQYKMREKMKST

SEQ ID NO: 361 - DNA, 1056 bp, Arabidopsis thaliana
  misc_feature: Ceres ANNOT ID no. 542494
  misc_feature: Ceres SEED LINE ME09515
  misc_feature: Genomic sequence
  misc_feature: The sequence encodes the protein given in SEQ ID NO. 175
atgggagattcggagtcatttgttgggaaaaattggaatggattgaaggatttctggagtgataggttatcatttttcgaaaattacaccagattcaccaaacgcgacgcgcctcttccttcttggtcttcctccgacgtcgaggaattcattgcctccgatcccgttcatggacccaccgtaatttccttctatctttctctcgctctgtgttttggaatctatagatattgttggtccattatctatgactcggctggtactcgattttactctgctgtcatcggtttatttttttcttcttcatttgattttccattggaaagtttctgttactttttgatataataaagttccactaggctaggtttttctggctttagtccttggaagcacagatacaagaggactaagcccactgcatcgtcgtcggatggcataaaaaacctagcaaaaactgaactgttggtttggtatttggtattcttactgaagatcttacgtttggtactcattgtgtatttgtggtcatcctatccagctgaaaacggctagggaagctgtgacgtttggtgttaccggagctgcacttggagctgtctctactgctgcttttgcctggaaatactccaggagtccacatggtaatgacatttctctctctgtgaataactatttgctctttataaacctcacttgtttcttcaaacgaagacacaaagcttgcaattcagggataatgggattatttgggagtcaattagacctttatgtcctatattgataatacttggaaactggtttgaaagtttatgcagttctcatggcgcttacattgtttctcaatactaaattgctgtttatttttcttccaacttttgacacctctaaactactgctggtgcgacaggtgctgcattgtccttcttaggaggaggtgtttttggttggacctttgggcaagaggtcgccaaccacacactgcaactctacaagttggacacaatggcagcccaagttaagttcatggaatggtgggaacgtaagtctcaataa

SEQ ID NO: 362 - DNA, 939 bp, Arabidopsis thaliana
  misc_feature: Ceres ANNOT ID no. 549258
  misc_feature: Ceres SEED LINE ME11837
  misc_feature: Genomic sequence
  misc_feature: The sequence encodes the protein given in SEQ ID NO. 185
atgggtcacttgccacagagcctctactccgccgctggaccaaagtttccatatcctggaagctccggtctaggagtagatcaacggaagctgacgtggagccgcttcccggtgttcctacggtgcgcgtcgacggagtcgttaacgagtttgactcagaataatgcggcggagatagagttgaagtatctggtgagtcaacacgggtgggacgtgaggagattgaatagagacgacgaggatgagatcaggagagtgtctcttgttcaagccgaagctttccacatccctcttgctctttttgatgattttttcttcatgttttttcaggtttgtttatttttcattctcatatatgatttacattgaagattattgttttgatgtatatgaagattttgataatatgtaatacaggcagaggttctatcagcacttctttacaaactaaagaattcaccacctgacaggtaaaacaaataacataacataatttctttaagactagtttttaaatgtgattaattataaaagttttaagaatttggcagatatgcatgtctcgtggcggagcaaacaagtgaaactgaaactttgtcgagctcaagtgttgtcggagtagttgatgtaacagctcaaactgaaagttcagtacttcgctattttccgggcgtcgaagaatatctatacgtctcgggtttagctgtctcaaaatctcaaaggagaaagaagatggcaagtacattgttaaaggcatgtgatgttttgtgttacttgtggggtttcaagcttcttgctctaagagcttatgaagacgatgcagctgctagaaatctttactcgaatgccggctacagtgtggtcgagactgacccgttgtggacctctacttggataggcagaaaacgtcgcgttcttatgagtaaacgcttttcttag

SEQ ID NO: 363 - DNA, 1352 bp, Arabidopsis thaliana
  misc_feature: Ceres ANNOT ID no. 841273
  misc_feature: Ceres SEED LINE ME11271
  misc_feature: Genomic sequence
  misc_feature: The sequence encodes the protein given in SEQ ID NO. 201
atgcgttgtgtgaatcgcgttgattgttcttggtcacggccaagcgaagcttaccgtatcttaccctccggtggtcacctttcatctggattccatcaatgtcctttatcgtctctatctttccgttcctctttcgtgtgttgctcctcctccacatctggaccgtccgattcaaatcccgaatcatcttcaaatcgctcttacagccgtagatggcagaatcctcttccccggcgtcaacatcccgatcaaataccgtcttctcagattgctcgtgattggatcgattcagatacaactccagtttctcaaggtagtttaataatgatcttatggaaaaactctgctcttacttatgaatttgtgaactagttaggatttagtaaattagagatattagtaatagcttgagttactgtttgtccatgaagcttgtgaaattgtggatgcctttggatcttactagtgtgtctctatgtaatattagctttagagagattcactgtagtgtcgtacaacatattgggagatggaaattcatcatatcacagagagttgtactccaatgtgtctgttccttacctcaagtggggctaccgcaaaaggttgatatgcgaagaactcattcgtctcaatccagacataatctctatgcaggtaatgaactttaccttgttttatatcgtgttaagatagttaagttgattttgtttgtggacctttgtaggaagtagataaatattttgatctattcagtatgatggagaaagctggatatgctggctcctataaggttgatgtatttccttgttcaatgaaaaattttatgcttataagattaatggggtaaaatgtaagacatggtttgtcggttggttttatttaccttttcgtctgaagcctcaacaaaagttgtgtttatatagaaggactacaaatataagctttgcaatggcagcggcgaactggagataacgtcgatggttgcgcaatgttttggaaggctgacaggtagcacatattgtttgactcaatctgtattagtgtgaagaaaaacgactactacaactcagcattgtttaagatttatcttgttttcaaaaggtttggagttttggagagggaaaacattgagtttagccagtttggtatgcgggataatgttgcacagcttgctgttcttgaggtagaaattttttttgaatgttttacgaacttcttttttcatgtatatgctttgactgatccagtttttttttgggtttcccgtcagctccggaagtctaataagtcaagaaagatactgctgggtaacattcacgtgctttataatccaaatcaaggagatgtga

SEQ ID NO: 364 - DNA, 836 bp, Arabidopsis thaliana
  misc_feature: Ceres ANNOT ID no. 564261
  misc_feature: Ceres SEED LINE ME11827
  misc_feature: Genomic sequence
  misc_feature: The sequence encodes the protein given in SEQ ID NO. 190
atggcttatgcaacttctacctatgcacgaacctcatgcattatcctacccaaaatccaaaacggcgcgcatttcacggatgacacgaaagcatttagaaggataacagcaagaagagtgacgcgtatatacgcgtcacaaggcccgactaaaccgtcaaaaccatctccaggagtagacacaagaatccactgggaaagcccggacgaaggctggatcggaggaagatccgacccggccaaatcggttgatgaggacaaaaccaatctccttagtgacgaaaaatttgcagaactaatcaaagactcttttgattctcattaccagtgagcaaaacaaacattctcattacatatctttttatttttatttttcaatatgtattgtaacatgtaacaataatcattttcagattcttaggtgtttcaacggatgctgatctagaagagataaaatctgcgtaccggagattatctaaagagtatcatccagatacaacttcactaccacttaaaacagcttcagaaaagttcatgaaattaagagaagtgtacaatgttttgagcgatgaagagactcggaggttttatgactggacactggctcaagaagttgcgagtcgtcaagctgagaaaatgagaatgaagctagaggatccgaaagagcaagattttaggggctatgaatcaatacctgatatggttgaccggttaggtggaagaaacatggagcttagtgatcaagcaatgactgctctcacgttcgatattttgatcgtattattcgctgtttgttgtatagcttttgtgattgttttcaaagatccttcttactag

SEQ ID NO: 365 - DNA, 937 bp, Arabidopsis thaliana
  misc_feature: Ceres ANNOT ID no. 565548
  misc_feature: Ceres SEED LINE ME11836
  misc_feature: Genomic sequence
  misc_feature: The sequence encodes the protein given in SEQ ID NO. 198
atggacttggctcttcattgtcattgtgcttacccgttgatcaaactaggattcatgagagctaaatcagccaatcatcttcatgttcgaggtaatcgaatatttgctaaaatcattagagatattgagaatgttccgagttttgtagaactttaggaactgccaaaaccattttttctgtacagctaaactgaatttggacagattgcagatactcattcactgccgtttgcgttgcgctttgagcagagtctttcgagaacaacgattaatggagatagaagtatttggtttcaagagaaaggtggttcttcttatacttcaatgggaagatccaagaaaggatgtgtttgttgcaagaaaccgtctgatagacgaacgtcaaacccaagtaaatcgaaccaagaggagatcatttcgctcttgaaacggattcaatcttcgatctctaaaggagagtctcgaggagtcgaggaagagaagaacagcgatgagtcttctaaggaaaagccgctgaccaaagctattcttgacgttcttgagaaatcaagaaaaaaaactgagggtaatcaactatgctttggtcaaatgtcaaaaatccatgttctcgccatttgttaatataatcaactttgcaactgtaggagatactagtgtgaaggagaagccaccaaagagacaagtagagcttcctcgaccaccgtctagttttgtcaagagaactcctttatcttcttctgcctcaggtccaagaggtaagctcccagtatcaaacagcgataaagctttaggaaaattgacaaagaaggaagagaaagcttcactgatagaaactatgaaacttgcagagctcaaagaagttgcaaagaacagaggaatcaaaggatactcaaagttgaggaagagtgaactattggagctgataagatcgtcctga

SEQ ID NO: 366 - DNA, 965 bp, Artificial sequence
  misc_feature: Ceres SEED LINE ME11833
  misc_feature: The sequence includes some vector sequence
  misc_feature: The sequence encodes the protein given in SED ID NO. 367
atggctgaagatgaagatcattattgtgaacaacacctgattggtccattggatcacagttcgtcaatggttgtcatcagagaatcgccaattttcgccaaggacgatggcgttgtgttcccgccgatctaccatgagaatctccatgtcgcttcttccgtctatggagtcgatagatacctcgaatctccgtcggaatcctcgtctccgtcatcttcgtcgagacgctctggttcatcttcttctttttcgttgtttccttctgattcagatggacaaacgtcactgactgcgtttgaatttgaccggaaggctccgtcggaaactgaagaaaaatctctgccgttgttgttaagcggtgaatctccaccgtccgattcgggggaacagtcgccatttgaacagatatctccgcgattaccttctgaacaaggcggcaagtctccaccatgcgattcagatgggaaattactggggaaaccattgaatcgtgaagttgatgtcctccacgattggtgggagcctcttcttgtacgtttatactccaagttgaagaatttgttgacctggttctcaaagactatccgatcattttatccagttcttgccattgcgatttggtggtggatgcgtgtacgagctcctcggaaacgcgttaaaggagaaaacatggatcatcttcgagatgtgatcaaagagagagacgaggtatgtttttgtgcatacaaagtgtttgatgaaatgcctaagagacgtgacattactattgttttctgattttgaaacagaggatagttcagcttttgcatcaacttgctcaaatgaatgagttactgttaaagcaccacaaggacattgtatcagaagagatgaccagagctctggtatcgataccgtcgacctcgagggggggcccgctagagtcctgctttaatgagatatgcgagacgcctatgatcgcatga

SEQ ID NO: 367 - protein, 294 aa, Artificial sequence
  misc_feature: Ceres SEED LINE ME11833
  misc_feature: The protein is based on inplanta DNA sequence
MAEDEDHYCEQHLIGPLDHSSSMVVIRESPIFAKDDGVVFPPIYHENLHVASSVYGVDRYLESPSESSSPSSSSRRSGSSSSFSLFPSDSDGQTSLTAFEFDRKAPSETEEKSLPLLLSGESPPSDSGEQSPFEQISPRLPSEQGGKSPPCDSDGKLLGKPLNREVDVLHDWWEPLLVRLYSKLKNLLTWFSKTIRSFYPVLAIAIWWWMRVRAPRKRVKGENMDHLRDVIKERDERIVQLLHQLAQMNELLLKHHKDIVSEEMTRALVSIPSTSRGGPLESCFNEICETPMIA

SEQ ID NO: 368 - DNA, 1542 bp, Populus balsamifera subsp. trichocarpa
  misc_feature: Ceres ANNOT ID no.1437978
  misc_feature: Encodes the protein given in SEQ ID NO. 369
atggcaactcaaagctatgtgttgtgtattctcattcttggcttggtagccagtaatattgtagcctctactacacctagccatgagattcattcttttaatcgtcagagttttccaccaggtttcatttttggggcagcatcagcagcttaccagtacgaaggtgcagctttccaagatggcaaaggactaagcatatgggatacatttacgcataaatttcctgaaaaaatagctgatcgtagcaatggagacgtggctgatgatcaatatcatcgttacaaggaagatgttaagatcatgaaagacatgggcttagactcctacagattttcaatctcatggcctagaatattgccaaaaggaaagctgagtgggggagtgaataaagcaggaatcaaatactacaacaacctcattaatgagctcgtagcaaatggcttaaaacccctggtgactcttttccattgggacactcctcaagccttagattctgagtatgggagttttctaagtactaggattgtgaaagacttcgaggactatgtagatgtttgctttagagaatttggagatagagttaagcactggatcacattgaatgaaccaaatatctttacttcgggaggctatgcttctggtggtggtgcaccaaatagatgttcagcttggcagaatttaaattgtactggtggagattcatcaacagaaccatatgtggtaggacacaatctgattaaatctcatgctgctgctgtaagattatacaaggcaaaataccaggcaactcaaaagggcataatagggatcacagtagcatcccactggtttttgccatactctaattctacacaggacaaagctgctgcacaacggtccctggatttcttgtatggatggtacatggatccagtagttttcggtgattatccaagttcaatgaggtctcttgttgggaaaagattacccaaattcaccaaggaggaatctgcatttataaagggatcatttgattttattgggttgaattactacactgctttctatgcggaaaatttgcctatatcaaatatttcacatccaagctccttgacggatagtcttgccaccagtaggagtgatcgtaatggtgttcttattggtccacaggcaggatcaacttggctccatgtttatcctaaaggaattcgtaaacttttgctctacaccaagaagaaatacaatgatccagttatttacatcactgagaatggcgtaagtgaggtaaataatgaaggcaaattaacgcttaagcaacaactaaatgacaccatgaggatcgattactaccgtagccatctctctttcttgagattagcaatggctgagggtgtcaaggtgaagggatacttcgcatggtcatttttggatgacttcgaatggaattctggttacaccgtaagatttggtatcatctacattgattataaaaatggattgaagagaatcccaaaactctcagctcggtggttcaagaacttcctcgagaaaaagaaggcatga

SEQ ID NO: 369 - protein, 513 aa, Populus balsamifera subsp. trichocarpa
  misc_feature: Ceres ANNOT ID no.1437978
  misc_feature (34)..(513): Pfam Name: Glyco_hydro_1 Pfam Description: Glycosyl hydrolase family 1
MATQSYVLCILILGLVASNIVASTTPSHEIHSFNRQSFPPGFIFGAASAAYQYEGAAFQDGKGLSIWDTFTHKFPEKIADRSNGDVADDQYHRYKEDVKIMKDMGLDSYRFSISWPRILPKGKLSGGVNKAGIKYYNNLINELVANGLKPLVTLFHWDTPQALDSEYGSFLSTRIVKDFEDYVDVCFREFGDRVKHWITLNEPNIFTSGGYASGGGAPNRCSAWQNLNCTGGDSSTEPYVVGHNLIKSHAAAVRLYKAKYQATQKGIIGITVASHWFLPYSNSTQDKAAAQRSLDFLYGWYMDPVVFGDYPSSMRSLVGKRLPKFTKEESAFIKGSFDFIGLNYYTAFYAENLPISNISHPSSLTDSLATSRSDRNGVLIGPQAGSTWLHVYPKGIRKLLLYTKKKYNDPVIYITENGVSEVNNEGKLTLKQQLNDTMRIDYYRSHLSFLRLAMAEGVKVKGYFAWSFLDDFEWNSGYTVRFGIIYIDYKNGLKRIPKLSARWFKNFLEKKKA

SEQ ID NO: 370 - DNA, 1470 bp, Populus balsamifera subsp. trichocarpa
  misc_feature: Ceres ANNOT ID no.1490788
  misc_feature: Encodes the protein given in SEQ ID NO. 371
atggcaactcaaagctatgtgttgtgtattctcattcttggcttggtagccagtaatattgtagcctctactacacctagccatgagattcattcttttaatcgtcagagttttccaccaggtttcatttttggggcagcatcagcagcttaccagtacgaaggtgcagctttccaagatggcaaaggactaagcatatgggatacatttacgcataaatttcctgaaaaaatagctgatcgtagcaatggagacgtggctgatgatcaatatcatcgttacaaggaagatgttaagatcatgaaagacatgggcttagactcctacagattttcaatctcatggcctagaatattgccaaaaggaaagctgagtgggggagtgaataaagcaggaatcaaatactacaacaacctcattaatgagctcgtagcaaatggcttaaaacccctggtgactcttttccattgggacactcctcaagccttagattctgagtatgggagttttctaagtactaggattgtagaatttggagatagagttaagcactggatcacattgaatgaaccaaatatctttacttcgggaggctatgcttctggtggtggtgcaccaaatagatgttcagcttggcagaatttaaattgtactggtggagattcatcaacagaaccatatgtggtaggacacaatctgattaaatctcatgctgctgctgtaagattatacaaggcaaaataccaggcaactcaaaagggcataatagggatcacagtagcatcccactggtttttgccatactctaattctacacaggacaaagctgctgcacaacggtccctggatttcttgtatggatggtacatggatccagtagttttcggtgattatccaagttcaatgaggtctcttgttgggaaaagattacccaaattcaccaaggaggaatctgcatttataaagggatcatttgattttattgggttgaattactacactgctttctatgcggaaaatttgcctatatcaaatatttcacatccaagctccttgacggatagtcttgccaccagtaggagatcaacttggctccatgtttatcctaaaggaattcgtaaacttttgctctacaccaagaagaaatacaatgatccagttatttacatcactgagaatggcgtaagtgaggtaaataatgaaggcaaattaacgcttaagcaacaactaaatgacaccatgaggatcgattactaccgtagccatctctctttcttgagattagcaatggctgagggtgtcaaggtgaagggatacttcgcatggtcatttttggatgacttcgaatggaattctggttacaccgtaagatttggtatcatctacattgattataaaaatggattgaagagaatcccaaaactctcagctcggtggttcaagaacttcctcgagaaaaagaaggcatga

SEQ ID NO: 371 - protein, 489 aa, Populus balsamifera subsp. trichocarpa
  misc_feature: Ceres ANNOT ID no.1490788
  misc_feature: Pfam Name: Glyco_hydro_1 Pfam Description: Glycosyl hydrolase family 1
MATQSYVLCILILGLVASNIVASTTPSHEIHSFNRQSFPPGFIFGAASAAYQYEGAAFQDGKGLSIWDTFTHKFPEKIADRSNGDVADDQYHRYKEDVKIMKDMGLDSYRFSISWPRILPKGKLSGGVNKAGIKYYNNLINELVANGLKPLVTLFHWDTPQALDSEYGSFLSTRIVEFGDRVKHWITLNEPNIFTSGGYASGGGAPNRCSAWQNLNCTGGDSSTEPYVVGHNLIKSHAAAVRLYKAKYQATQKGIIGITVASHWFLPYSNSTQDKAAAQRSLDFLYGWYMDPVVFGDYPSSMRSLVGKRLPKFTKEESAFIKGSFDFIGLNYYTAFYAENLPISNISHPSSLTDSLATSRRSTWLHVYPKGIRKLLLYTKKKYNDPVIYITENGVSEVNNEGKLTLKQQLNDTMRIDYYRSHLSFLRLAMAEGVKVKGYFAWSFLDDFEWNSGYTVRFGIIYIDYKNGLKRIPKLSARWFKNFLEKKKA

SEQ ID NO: 372 - DNA, 1922 bp, Panicum virgatum
  misc_feature: Ceres CLONE ID no.1777157
  misc_feature: Encodes the protein given in SEQ ID NO. 373
agggacctccagctcgttgcgtctataaaaggtagaggcatagcagccgggactgagagtgcagcagcaaatcctgggccaggccggggtcgaggacggagccaaccgtccgttccggcactagctttggggatgggtgcccggaccggaatggcggcgaagcggctcctgtcctctgtgctcctcgtcgcagctctcgcctgcgacggcacgcatgccaagttcagcaggcacagcttccccaaggacttcatcttcggcaccggctccgcggcgtaccagtacgagggagcatacaaggaaggaggcaaagggcttagcatatgggacaagttcacccacatcccaggaaaaatcttgaacaacgataacggcgacgtggcacttgacatgtaccatcgatacaagggggatgtgcaactcctcaaggacatgaacatggactccttccggttctccattgcttggagcaggatcttgccaaatggttccctaagtggaggaatcaacaaagagggcgtggccttctacaacaacctcatcaacgaagtcatcgccaaaggactgcggccattcgtcaccatcttccactgggacacgcccctggccttggaggagaagtacggaggcttcctcagtgagaacatcatcaaggactacgtggacttctccgaggtctgcttcatggagttcggcgaccgcgtcaaggactggaccaccttcaacgagccctggacgtacgcggagcgtggctactccgcgggggccttcgcccccggccgctgctcgccgcacgtctccacgtcctgcttccccggcgactcggcgcgggagccctacgtcgtgacgcaccacatcctcctcgcccacgcccaggccgtggcgctctaccgcgcccggtaccagaaggcgcagcgcgggcagatcggcatcaccgtggtctcccactggttcgtccccgccaccaactcctccgccgaccgcgctgccgtgcgccgcagcctcgacttcatgctcggctggttcctcgaccccatcgtgcacggcgcgtacccggccaccatggccgggtacctcggtgcccggctgccccggttcacgccggagcaggcgcggctcgtcaggggctcctacgacttcatcggcgtcaactactacaccacctacttcactaccgccgtgccgccggccaacaagctccggcagtcgtacgacaccgacgtccgcgccaacacctccggcttccgcaacggcgtgcccatcggcaagccggagttcgtgtccatcttcttcaactaccccgccggcctccgggagctcctgctctacaccagccggcggtacggcaacccggtgttgtacgtcacggagaacggcatcgccgaggggaacaacgcgacgctgccgctcgcggaggcgctcaaggacgggcacaggatcgagttccacgccaagcacctgcagttcgtgaaccacgccatcagggacggcgccaacgtcaagggctacttcatgtggaccttcatggactgcttcgagtggggcgacggctacctcgatcgattcggcctcatcttcatcgaccgcatcaatggcctcaagcgctaccggaaggagtcaagctactggatcgagaacttcctcaagcggtagacagatccttttctggtctggagagtccatccacatcgatcgacctcttgtttcaaaggctgggtgttgccatggcatgagctggctgtatttgtttgcagagagatttattttgcgcattgggtgcctggggtgtctcgcagataaagggggaataaagctcactgcggagagctatgtatctgtcagtcaaacgtcgtgtattgtagttcagttaatcagttcctcaatcagaataaaccaaataaagttgtgaaaggttttgaacg

SEQ ID NO: 373 - protein, 506 aa, Panicum virgatum
  misc_feature: Ceres CLONE ID no.1777157
  misc_feature (32)..(505): Pfam Name: Glyco_hydro_1 Pfam Description: Glycosyl hydrolase family 1
MGARTGMAAKRLLSSVLLVAALACDGTHAKFSRHSFPKDFIFGTGSAAYQYEGAYKEGGKGLSIWDKFTHIPGKILNNDNGDVALDMYHRYKGDVQLLKDMNMDSFRFSIAWSRILPNGSLSGGINKEGVAFYNNLINEVIAKGLRPFVTIFHWDTPLALEEKYGGFLSENIIKDYVDFSEVCFMEFGDRVKDWTTFNEPWTYAERGYSAGAFAPGRCSPHVSTSCFPGDSAREPYVVTHHILLAHAQAVALYRARYQKAQRGQIGITVVSHWFVPATNSSADRAAVRRSLDFMLGWFLDPIVHGAYPATMAGYLGARLPRFTPEQARLVRGSYDFIGVNYYTTYFTTAVPPANKLRQSYDTDVRANTSGFRNGVPIGKPEFVSIFFNYPAGLRELLLYTSRRYGNPVLYVTENGIAEGNNATLPLAEALKDGHRIEFHAKHLQFVNHAIRDGANVKGYFMWTFMDCFEWGDGYLDRFGLIFIDRINGLKRYRKESSYWIENFLKR

SEQ ID NO: 374 - DNA, 1838 bp, Panicum virgatum
  misc_feature: Ceres CLONE ID no.1792940
  misc_feature: Encodes the protein given in SEQ ID NO. 375
gcaccgacaattccggctccgatccagttcttcggaaacgggtcctggaaccggaatggcgcggcgggtcctctccgcgctgcttctcgcagccctggcgtgcgacgtcgcgtccgccgagttcggcaggcacagcttccccgagggcttcgtcttcggcaccggctccgcggcgtaccagtacgagggtgcctacaaggaaggaggcaaaggtcccagcgtgtgggacatcttcagtcacttaccaggtaaaatcaagaacaatgatactggcgatgtagcggatgacttctaccatcgatacaaggaggacgtgaagctcctcaaggacatgaacatggatgccttccggttctcaattgcctggaccaggatcctgccaactggctccctgagcggaggaatcaacaaggaaggggtggccttctacaacaacctcatcaacgaggtcatagcaaatgggctgaagccattcgtcaccatcttccactgggacacaccccaggccctcgagagcaagtataagggcttcctcagcgagaacatcatccaggactacgtggacttcgcggaggtgtgcttccgcgagttcggcgaccgcgtcaagttctggaccacgttcaacgagccctggacgtacgcgtcgcaggggtacggcaacggcgcccacgcccccggccggtgctcgccgtccatctccccgtcctgcacccccggcgactccggccacgagccctacctcgtgacgcaccacatcctcctcgcccacgccagggccgtggcgctgtaccgcgcccggtaccagccagcgcagcgcggccagatcggcatcaccgtggtctcgcactggttcgtgcccaacaccgacacccccgccgaccgccgggccgtgcagcgcagcctggacttcatgctcggctggttcctgagccccatcgtgcacggcgcgtacccgggcaccatgaccagcttcctcggcggccggctgccgcggttcacgccggagcaggcggagatggtcaggggctcctacgacttcatcggcctcaactactacaccagctacttcacctcggcgcggcccgcgcccaacgggctcgcgcagtcctacgaaggcgacatccgcgccaacacctccggcttccgcgacggcgtgcccgtcggccagccggagttcgtgcccatcttcttcaactccccggccggcctccgcgagctcctgctctacaccaagcgccggtacaacaaccccgtcatctacgtcaccgagaacggcattgccgaggagaacagcgcacgcatcccgctcagggaggcgctcaaggacgggcaccggatcgagttccactccaggcacctgcagttcgtgaaccacgccatcaggaacggcgtcaaggtaaagggttacttcacctggaccttcatggactgcttcgaatggggcgacgggtacctcgaccgcttcggcctcatcttcatcgaccgcctcaacgggctcaagcgctaccgcaagcagtccagctactggatcgagaagttcctgaagcgctagacggtttaatttgcagcccacactgctggtcacgaggtccatccatgtcgatctcatcctgtttcgatcgacaagctggtggtggtgccatgatgccgttgctgctgccatggcatcttctagctagtttgctgccgaggggccggggtgtatttgtttccagagagcgattgctgttttgtgggtcggggttgccgctgtcgttgcattgtgtgtgcttggtgcttgcagagagggaaataaagctcacttcggagctatctgtcaaaaaaaaaaaaaaaaaaaa

SEQ ID NO: 375 - protein, 498 aa, Panicum virgatum
  misc_feature: Ceres CLONE ID no.1792940
  misc_feature (24)..(497): Pfam Name: Glyco_hydro_1 Pfam Description: Glycosyl hydrolase family 1
MARRVLSALLLAALACDVASAEFGRHSFPEGFVFGTGSAAYQYEGAYKEGGKGPSVWDIFSHLPGKIKNNDTGDVADDFYHRYKEDVKLLKDMNMDAFRFSIAWTRILPTGSLSGGINKEGVAFYNNLINEVIANGLKPFVTIFHWDTPQALESKYKGFLSENIIQDYVDFAEVCFREFGDRVKFWTTFNEPWTYASQGYGNGAHAPGRCSPSISPSCTPGDSGHEPYLVTHHILLAHARAVALYRARYQPAQRGQIGITVVSHWFVPNTDTPADRRAVQRSLDFMLGWFLSPIVHGAYPGTMTSFLGGRLPRFTPEQAEMVRGSYDFIGLNYYTSYFTSARPAPNGLAQSYEGDIRANTSGFRDGVPVGQPEFVPIFFNSPAGLRELLLYTKRRYNNPVIYVTENGIAEENSARIPLREALKDGHRIEFHSRHLQFVNHAIRNGVKVKGYFTWTFMDCFEWGDGYLDRFGLIFIDRLNGLKRYRKQSSYWIEKFLKR

SEQ ID NO: 376 - DNA, 1802 bp, Gossypium hirsutum
  misc_feature: Ceres CLONE ID no.1926430
  misc_feature: Encodes the protein given in SEQ ID NO. 377
atctctctctctctctctctcccatatcaattctctgtaatagttgaattaaaggcatggtgctaaagggcattgctttacccattattaccttgttactagctttgggaatccaggctgggttttctcagaatattagcaaagccagctttccaaagggcttcatttttgggactgcctcttctgctttccagtatgaaggagcagtgaaggaggatggaaggggaccaactatttgggacacattctcgcatacttttgggaagatacttgatggtagcaatgcggatgttgctgtggatcagtaccaccgttatcctgaagatatacaactgatgaaagacatggggatggatgcttacaggttttcaatagcctggtctcggatattccctaatggtacgggcgaaataaaccaggccggtgttgatcattacaacaatttcattaatgctttgctcgcggcaggaatccaaccatatgtgaccctttaccactgggatcttcctcaagcattggaggacaaatacaatggatggctcgatcctcaaattataaaggactttgcgatgtatgctgagacatgcttcaagttatttggtgacagggtgaaatactggatgacttttaatgaacctgatacatttacggtacagggttatgatgtaggtcttcaagctccgggacgctgctccatagttcttcatctgttctgcaaggccggaaactctggaaccgagccttacatagttgcccataatgttctcctttctcatgcaactgctgtggatatttacaggaaaaagtacaaggcaaagcaacatggatctgttggggtatcgtttaatgttatttggtttgaaccagagactaattcaactgaagacattgaagcagctcaaaaagcccaagattttcagcttggctggtttttggacccattgatgttcggagattatccaagttcgatgctaacccaagtaggaagctggttgccgaggtttactaaagctgagtctgctcttcttaagggatctttggattttgttggcgttaatcactacactaccttttatgcaagagaaaacaaaactaatctgattggtagtatactaaatgacactgtttcggactccggtgcctttacattacctttcaagcatgggaaacccataggagacaaggcaaattctatatggttatacatagtaccccgtggtatgagaagcctaatgaattacgtcaaggaaaaatacggaaaccctccggtcattgttacagaaaatggtatggatgacccgaatagccaattcatatccattaaaaatgctctcaaggatgagaaaagaatcaaatacctcaatgactacttaactaacctgctcgctgctatcaaggaagatggttgcaatgttaaagggtactttgtgtggtcgctactcgacaactgggagtggggagccgggtactcctcgagattcggtctatatttcatcgactataaagacaatctcaagagataccccaaggactctgtcaaatggttcaagaacttcctagggtctgcttaagaatggtgtaaatgaattgcagatgtcggtctctgagactgttgcaaattgcaacacttagaacagttgtatggtagttattctttaataaagaacatattgattgttgtcaaagatgtaagaaaaccgaaagatgaatcggagtgtttaggaaggcttgattataatcttcatagtttttcattctattacacttgttaatgaacatgcaattttaattgctttaacttt

SEQ ID NO: 377 - protein, 504 aa, Gossypium hirsutum
  misc_feature: Ceres CLONE ID no.1926430
  misc_feature (28)..(503): Pfam Name: Glyco_hydro_1 Pfam Description: Glycosyl hydrolase family 1
MVLKGIALPIITLLLALGIQAGFSQNISKASFPKGFIFGTASSAFQYEGAVKEDGRGPTIWDTFSHTFGKILDGSNADVAVDQYHRYPEDIQLMKDMGMDAYRFSIAWSRIFPNGTGEINQAGVDHYNNFINALLAAGIQPYVTLYHWDLPQALEDKYNGWLDPQIIKDFAMYAETCFKLFGDRVKYWMTFNEPDTFTVQGYDVGLQAPGRCSIVLHLFCKAGNSGTEPYIVAHNVLLSHATAVDIYRKKYKAKQHGSVGVSFNVIWFEPETNSTEDIEAAQKAQDFQLGWFLDPLMFGDYPSSMLTQVGSWLPRFTKAESALLKGSLDFVGVNHYTTFYARENKTNLIGSILNDTVSDSGAFTLPFKHGKPIGDKANSIWLYIVPRGMRSLMNYVKEKYGNPPVIVTENGMDDPNSQFISIKNALKDEKRIKYLNDYLTNLLAAIKEDGCNVKGYFVWSLLDNWEWGAGYSSRFGLYFIDYKDNLKRYPKDSVKWFKNFLGSA

SEQ ID NO: 378 - DNA, 1917 bp, Zea mays
  misc_feature: Ceres CLONE ID no.327253
  misc_feature: Encodes the protein given in SEQ ID NO. 379
agattgacctgttgccctgttgagtgtgaaggaggcgcacgcgcttgagctgaagaaactgccgcgctgatctagcccgccgggatgggcgcctcggggcctgcggctccgccggcaacgcatcgccgccgctgcatccagctgctgctgctgctcgccctggccgtcgcgccgcttggcagccgtgggcttcgcgtccgtgccgcgggggcggacacgggagggctgagccgggacgcgttcccgaaggggttcgtcttcgggacggcgacgtccgcgtaccaggtcgagggcgcggcgacgtccggcggccgcgggccctgcatctgggatcccttcgtccacacccccggaaagattgctgaagacgccaacgcagatgttacaacagatgaatatcatcgctacaaggaagatgttgatctcatgaaaagcctaaattttgatgcataccggttttcaatctcctggtccaggatcttcccagatggcgaagggaaaattaatgaagaaggagtacagtattacaacaatcttatagactacatgattaagcaaggccttactccttacgccaaccttaaccactatgatcttccgcttgcgcttcagaagaagtaccaaggctggttaggcccaaaaattgtggacatatttgctgactatgctgatttttgtttcaagacttttggcaatcgagtcaagaactggttcacattaaatgagccaaggatagtagcattccttggttatgataaagggcttaacccccctaaccggtgcacacaatgcactgccggtgggaactcatcgacagaaccttacattgttgttcataacattctcctatctcatgctactgcagttgcaagataccgcaataaataccaggcaactcagaaaggcaaggtcgggatagttcttgacttcaactggtatgaaccttttacaaactcaactgaagatcaaaaagcagcgcaaagggccagggacttccatattggttggtttcttgatccattaataaatgggcaatatccaaagataatgcaagacattgtgaaagaccggctaccaagtttcacacctgaacaggccaagctagtcaagggctcatcagactatttcgggatcaatcaatatactacatactacattgcagatcaacaaactcctccgcagggaccaccgagctactcgtccgactggggcgtccaatattactttcaaaggaatggcgtgcaaattggacagatggcgcactcaatttggctttacatcgtcccatcgggcatgtatggagtcgtgaactacctaaaggaaaagtaccataatccaatcatcatcatatcggaaaacggaatggatcagcctggaaacctcacgcgcgaggagtacgtgcacgacgccgtgaggatcgacttctacaagaactacctgacggagctaaagagagggatcgacggcggcgcgaacgtgatcggctacttcgcgtggtctctcctggacaacttcgagtggctgtcgggctacacgtccaagttcggcatcgtctacgtcgacttcgcgacgctgaagcggtaccccaaggactcggcgtactggttcagagacatgctttcggggacgggctccaaggctgctaccccgcagactggttcaggcggccggccggctggttcggcttcagccacctcgaacggacctgccttgctggtctcccttttggtctccttgggtgttctgcttccatccatcttcatggtttcctcggtctaattagaaatgtattttcatagtacggatttgtagttgtgtggatgacaacatgttccttttaagaatcaggacatgttgcatcgatgcgggacctgttgtaggaatgagaccatgattcagggcttattgttcagagtc

SEQ ID NO: 379 - protein, 564 aa, Zea mays
  misc_feature: Ceres CLONE ID no.327253
  misc_feature (49)..(517): Pfam Name: Glyco_hydro_1 Pfam Description: Glycosyl hydrolase family 1
MGASGPAAPPATHRRRCIQLLLLLALAVAPLGSRGLRVRAAGADTGGLSRDAFPKGFVFGTATSAYQVEGAATSGGRGPCIWDPFVHTPGKIAEDANADVTTDEYHRYKEDVDLMKSLNFDAYRFSISWSRIFPDGEGKINEEGVQYYNNLIDYMIKQGLTPYANLNHYDLPLALQKKYQGWLGPKIVDIFADYADFCFKTFGNRVKNWFTLNEPRIVAFLGYDKGLNPPNRCTQCTAGGNSSTEPYIVVHNILLSHATAVARYRNKYQATQKGKVGIVLDFNWYEPFTNSTEDQKAAQRARDFHIGWFLDPLINGQYPKIMQDIVKDRLPSFTPEQAKLVKGSSDYFGINQYTTYYIADQQTPPQGPPSYSSDWGVQYYFQRNGVQIGQMAHSIWLYIVPSGMYGVVNYLKEKYHNPIIIISENGMDQPGNLTREEYVHDAVRIDFYKNYLTELKRGIDGGANVIGYFAWSLLDNFEWLSGYTSKFGIVYVDFATLKRYPKDSAYWFRDMLSGTGSKAATPQTGSGGRPAGSASATSNGPALLVSLLVSLGVLLPSIFMVSSV

SEQ ID NO: 380 - DNA, 1911 bp, Triticum aestivum
  misc_feature: Ceres CLONE ID no.732610
  misc_feature: Encodes the protein given in SEQ ID NO. 381
ataggcaaccattcatcccattggccgcagtgtccaacgggtgggaggcagcagggagaattaatgggtaagcgccaggttctccccgctctcctcctcgccctcctggcccttgcgtccagcggcggcggtgcccatccggctacgccggtgaaggcgccgttcagcaggcacagcttccccaaggggttcgtcttcggcaccggctccgcagcctaccagtacgaaggcgccgtcaaggaaggtggccggggaccgacggtgtgggacaagttcgcccatactccaggcaagatcgcagacggtggcaatggagacgtagcgctagatttttaccatcgctacaaggaggatctgaagttggtggtggacatgaacatggatgccttcaggttctctatcgcgtggagcaggatactgccaactggttctctgagtggaggagttaacagccacgggattgcattttacaatagccttatcaacgaggtcatagctaaagggttgaagccatatgtcacactgcaccactgggacacacccctggggctagaggacaaatacggtggcttcctcagtgaaaagattgtgaaggactacgtggacttcacggacgtgtgcttcaacgagttcggcgaccgcgtgaagaactggacgacgttcaacgagccgtggacgtacagcacctacggctacgccaccggcgtgttcgcgccggggcggtgctcgccgcacgtctccaagtcctgcggcgccggcgactcggcccgggagccctacatcgtgacgcacaacatcctgctggcccacgccgccgccgtccagctgtaccggcgaaagtaccagaaggcgcagggcggcgagatcggcatcacgctggtgtgccactggtacctcccctacagcaactccaccgccgacaaggacgccgccaagcgccgggtggagttcatgctggggtggttcatggaccccatcgtgcacggcgactacccggcgtccatgaagagctggctcggcgcccggctgccgagcttcacccgggagcagaaggcgatgctcaaggggtcgcacgacttctttggcctcaactactacaccacctactacgccatcgccacgcccccggccaacgccctcctcggctcctacgacgccgacaaccgctccaacgtcaccggcttccgcaacggcaagcccctcggcccgcaggcctacaccgagttcctcttcgtgtacccgccgggcatcctcgagctcatgctctacgccaagcgcaagtacaacaacccggccatcttcgtcatggagaacggcatcgacgaggggaacaacagcacgctgcccatcaaggaggcgctcaaggaccccgccaggatcaactaccactacaagcacctcctcttcctcaacctcgcaatcaagcacaaggtgaacataaggggctacttctcgtggacgttcatggactgcttcgagtggggggacgggtacaaggaccgcttcggcctcatctacatcgaccgcaacacgctcaagcgctaccccaaggactccagcaaatggatgggcagattcctcaagaaatgatccatgatccatctgcatgcgcaggcctggtctcatctctggggggcgttcgggtttagcatctgcatatgctgcaagcatgcatggtttgtgagtttgagactatgagttgcggtgataccgccgttattaactacagtaactagtagtacttggacatgtggagtgtctattattttattttatttttatttatgcgggggatgttgagcgtgagtcatggctgttgaataagcgtttgctgcatttggccgtcgatcgtgcgaaggaataaaacttgaggttgaggatgtgttgttcttctcaaaaaaaaaaaaaaaa

SEQ ID NO: 381 - protein, 508 aa, Triticum aestivum
  misc_feature: Ceres CLONE ID no.732610
  misc_feature (35)..(508): Pfam Name: Glyco_hydro_1 Pfam Description: Glycosyl hydrolase family 1
MGKRQVLPALLLALLALASSGGGAHPATPVKAPFSRHSFPKGFVFGTGSAAYQYEGAVKEGGRGPTVWDKFAHTPGKIADGGNGDVALDFYHRYKEDLKLVVDMNMDAFRFSIAWSRILPTGSLSGGVNSHGIAFYNSLINEVIAKGLKPYVTLHHWDTPLGLEDKYGGFLSEKIVKDYVDFTDVCFNEFGDRVKNWTTFNEPWTYSTYGYATGVFAPGRCSPHVSKSCGAGDSAREPYIVTHNILLAHAAAVQLYRRKYQKAQGGEIGITLVCHWYLPYSNSTADKDAAKRRVEFMLGWFMDPIVHGDYPASMKSWLGARLPSFTREQKAMLKGSHDFFGLNYYTTYYAIATPPANALLGSYDADNRSNVTGFRNGKPLGPQAYTEFLFVYPPGILELMLYAKRKYNNPAIFVMENGIDEGNNSTLPIKEALKDPARINYHYKHLLFLNLAIKHKVNIRGYFSWTFMDCFEWGDGYKDRFGLIYIDRNTLKRYPKDSSKWMGRFLKK

SEQ ID NO: 382 - protein, 548 aa, Raphanus sativus
  misc_feature: Public GI ID no.11034734
  misc_feature (41)..(524): Pfam Name: Glyco_hydro_1 Pfam Description: Glycosyl hydrolase family 1
MKLLHGLALVFLLAAASCKAYEEITCEENEPFTCNNTARLSSKNFPKDFIFGVASSAYQIEGGRGRGVNIWDGFSHRYPEKAGSDLKNGDTSCESYTRWQKDVDVMGEINATGYRFSFAWSRIIPKGKVSRGVNQGGLDYYHNLIDALLEKNITPFVTLFHWDLPQTLQDEYEGFLDRQIIQDFKDYADLCFREFGGKVKHWITINQLYTVPTRGYAIGTDAPGRCSPMVDTKHRCYGGNSSTEPYIVAHNQLLAHATVVDLYRTKYKFQRGKIGPVMITRWFLPFDESDPASIEAAERMNQFFHGWYMEPLTKGRYPDIMRQIVGSRLPNFTEEEAALVARSYDFLGLNYYVTQYAQPKPNTYPSPKHTAQDDAGVKLSYKNSRGEFIGPLFVEDKDNGNSYYYPKGIYYVMDYFKTKYGNPLIYVTENGFSTPDSENREQAIADYRRIDYLCSHLCFLRKVINEKGINVRGYFAWALGDNYEFCKGFTVRFGLSYVNWADLNDRNLKESGKWYQRFISGTVKNPAKQDFLRSSLSSQSQKKRLADA

SEQ ID NO: 383 - protein, 546 aa, Raphanus sativus
  misc_feature: Public GI ID no.11034736
  misc_feature (40)..(523): Pfam Name: Glyco_hydro_1 Pfam Description: Glycosyl hydrolase family 1
MKLLGLALVLLLAAASCKAGEEITCEENEPFTCSNTAKLSSKSFGKDFIFGVASSAYQIEGGRGRGVNIWDGFSHRYPEKSGSDLKNGDTTCESYTRWQKDVDVMGEINATGYRFSFAWSRIIPKGKVSRGVNQGGLEYYHKLIDALLEKNITPFVTLFHWDLPQTLQDEYEGFLDRQIIQDFKDYADLCFKEFGGKVKHWITINQLYTVPTRGYAIGTDAPGRCSPMVDTKHRCYGGNSSTEPYIVAHNQLLAHAAAVDLYRTKYKFQKGKIGPVMITRWFLPYDDSDPASIEAAERMNQFFHGWYMEPLTKGRYPDIMRQIVGSRLPNFTEEEAALVAGSYDFLGLNYYVAQYTQPKPNPYPSETHTAMMDAGVKLTYENSRGELIGPLFVEDKDNGNSYYYPKGIYYVMEYFKTKYGNPLIYVTENGFSTPGSEKREQAIADYKRIDYLCSHLCFLRKVIKEKGVNVRGYFAWALGDNYEFCKGFTVRFGLSYVNWDDLDDRNLKESGQWYQRFINGTVKNPAKQDFLRSSLSSQSQKRLADA

SEQ ID NO: 384 - protein, 503 aa, Camellia sinensis
  misc_feature: Public GI ID no.110623260
  misc_feature (35)..(503): Pfam Name: Glyco_hydro_1 Pfam Description: Glycosyl hydrolase family 1
MMAAKGSVVVGVLAIVAYAFVVSEVAIAAQISSFNRTSFPDGFVFGIASSAYQFEGAAKEGGKGPNIWDTFTHEFPGKISNGSTGDVADDFYHRYKEDVKVLKFIGLDGFRMSISWARVLPRGKLSGGVNKEGIAFYNNVINDLLSKGIQPFITIFHWDLPQALEDEYGGFLSPHIVNDFRDFAELCFKEFGDRVKHRITMNEPWSYSYGGYDAGLLAPGRCSAFMAFCPKGNSGTEPYIVTHNLLLSHAAAVKLYKEKYQAYQKGQIGITLVTYWMIPYSNSKADKDAAQRALDFMLGWFIEPLSFGEYPKSMRRLVGKRLPRFTKEQAMLVKGSFDFLGLNYYIANYVLNVPTSNSVNLSYTTDSLSNQTAFRNGVAIGRPTGVPAFFMYPKGLKDLLVYTKEKYNDPVIYITENGMGDNNNVTTEDGIKDPQRVYFYNQHLLSLKNAIAAGVKVKGYFTWALLDNFEWLSGYTQRFGIVYVDFKDGLKRYPKDSALWFKK

SEQ ID NO: 385 - protein, 493 aa, Trifolium repens
  misc_feature: Public GI ID no.114974
  misc_feature (36)..(493): Pfam Name: Glyco_hydro_1 Pfam Description: Glycosyl hydrolase family 1
MDFIVAIFALFVISSFTITSTNAVEASTLLDIGNLSRSSFPRGFIFGAGSSAYQFEGAVNEGGRGPSIWDTFTHKYPEKIRDGSNADITVDQYHRYKEDVGIMKDQNMDSYRFSISWPRILPKGKLSGGINHEGIKYYNNLINELLANGIQPFVTLFHWDLPQVLEDEYGGFLNSGVINDFRDYTDLCFKEFGDRVRYWSTLNEPWVFSNSGYALGTNAPGRCSASNVAKPGDSGTGPYIVTHNQILAHAEAVHVYKTKYQAYQKGKIGITLVSNWLMPLDDNSIPDIKAAERSLDFQFGLFMEQLTTGDYSKSMRRIVKNRLPKFSKFESSLVNGSFDFIGINYYSSSYISNAPSHGNAKPSYSTNPMTNISFEKHGIPLGPRAASIWIYVYPYMFIQEDFEIFCYILKINITILQFSITENGMNEFNDATLPVEEALLNTYRIDYYYRHLYYIRSAIRAGSNVKGFYAWSFLDCNEWFAGFTVRFGLNFVD

SEQ ID NO: 386 - protein, 531 aa, Prunus avium
  misc_feature: Public GI ID no.1155255
  misc_feature (30)..(509): Pfam Name: Glyco_hydro_1 Pfam Description: Glycosyl hydrolase family 1
LLLLGFALANTNAARTDPPVVCATLNRTNFDTLFPGFTFGTATASYQLEGAANIDGRGPSIWDAFTHNHPEKITDGSNGDVAIDQYHRYKEDVAIMKDMGLDAYRFSISWSRLLPNGTLSGGINKKGIEYYNNLTNELIRNGIEPLVTLFHWDVPQALEEEYGGVLSPRIVYDFKAYAELCYKEFGDRVKHWTTLNEPYTISNHGYTIGIHAPGRCSSWYDPTCLGGDSGTEPYLVTHNLLLAHAAAVKLYREKYQASQEGVIGITVVSHWFEPASESQKDINASVRALDFMYGWFMDPLTRGDYPQSMRSLVKERLPNFTEEQSKSLIGSYDYIGVNYYSARYASAYPEDYSIPTPPSYLTDAYVNVTTELNGVPIGPQAASDWLYVYPKGLYDLVLYTKNKYNDPIMYITENGMDEFNNPKISLEQALNDSNRIDYCYRHLCYLQEAIIEGANVQGYFAWSLLDNFEWSEGYTVRFGINYVDYDNGLKRHSKLSTHWFKNFLKRSSISKEKIRRCGNNNARARKFVYRI

SEQ ID NO: 387 - protein, 550 aa, Brassica juncea
  misc_feature: Public GI ID no.12621052
  misc_feature (41)..(524): Pfam Name: Glyco_hydro_1 Pfam Description: Glycosyl hydrolase family 1
MKLLYGLALVFLLAAASCKADEEITCEQNEPFTCGNTDILSSKNFGKDFIFGVASSAYQIEGGRGRGVNVWDGFSHRYPEKSGSDLKNGDTSCESYTRWKKDVEIMGELNATGYRFSLAWSRIIPKGKVSRGVNQGGLDYYHSLIDALLEKNITPFVTLYHWDLPQTLQDEYEGFLDRQIIQDFKDYADLCFKEFGGKVKHWITINQLFTVPTRGYALGTDAPGRCSPMVDSKHRCYGGNSSTEPYIVAHNELLAHAAVVDLYRKNYADQKGKIGPVMITRWFLPYDEADPSCREAADRMNQFFHGWYMEPLTKGKYPDIMRKIVGSRLPNFTEAEAKLVAGSYDFLGLNYYVTQYAQPKANPLLSEKHTAMMDAGVGLTYDNSRGEFIGPLFIEDKIAGNSYYYPKGIYYVMEYFKTQYNDPLIYVTENGFSTPSSENRCEAIADYKRIDYLCSHLCFLRKVIKDRGVNVRGYFAWALGDNYEFCKGFTVRFGLSYVNWDDLDDRNLKESGKWYQRFINGTSKNPTKQDFLRSSLSFLKARRRGLLADA

SEQ ID NO: 388 - protein, 548 aa, Brassica napus
  misc_feature: Public GI ID no.127733
  misc_feature (41)..(524): Pfam Name: Glyco_hydro_1 Pfam Description: Glycosyl hydrolase family 1
MKLLHGLALVFLLAAASCKADEEITCEENNPFTCSNTDILSSKNFGKDFIFGVASSAYQIEGGRGRGVNVWDGFSHRYPEKAGSDLKNGDTTCESYTRWQKDVDVMGELNATGYRFSFAWSRIIPKGKVSRGVNQGGLDYYHKLIDALLEKNITPFVTLFHWDLPQTLQDEYEGFLDRQIIQDFKDYADLCFKEFGGKVKHWITINQLYTVPTRGYAIGTDAPGRCSPMVDTKHRCYGGNSSTEPYIVAHNQLLAHATVVDLYRTKYKFQKGKIGPVMITRWFLPFDESDPASIEAAERMNQFFHGWYMEPLTKGRYPDIMRQIVGSRLPNFTEEEAELVAGSYDFLGLNYYVTQYAQPKPNPYPSETHTAMMDAGVKLTYDNSRGEFLGPLFVEDKVNGNSYYYPKGIYYVMDYFKTKYGDPLIYVTENGFSTPSSENREQAIADYKRIDYLCSHLCFLRKVIKEKGVNVRGYFAWALGDNYEFCKGFTVRFGLSYVNWEDLDDRNLKESGKWYQRFINGTVKNAVKQDFLRSSLSSQSQKKRFADA

SEQ ID NO: 389 - protein, 544 aa, Sinapis alba
  misc_feature: Public GI ID no.127734
  misc_feature (41)..(521): Pfam Name: Glyco_hydro_1 Pfam Description: Glycosyl hydrolase family 1
MKLLHGLALVFLLAAASCKADEEITCEENEPFTCSNTDILSSKNFGKDFIFGVASSAYQIEGGRGRGVNVWDGFSHRYPEKSGSDLKNGDTSCESYTRWKKDVEIMGELNATGYRFSFAWSRIVPKGKVSRGVDQAGLDYYHNLIDALLEKNITPFVTLFHWDLPQTLQDEYEGFLDRQIIQDFKDYADLCFKEFGGKVKNWITINQLYTVPTRGYALGTDAPGRCSPKVDTKQRCYGGNSSTEPYIVAHNQLLAHAAIVDLYRTNYAFQNGKIGPVMITRWFLPYDESDPACIEAAERMNQFFHGWYMEPLTKGRYPDIMRQIVGSRLPNFTEAEAELVAGSYDFLGLNYYVTQYAKPKPNPYPSETHTALMDAGVDLTFNNSRGEYPGPVFAEDANSYYYPKGIYYVMDYFKTKYNNPLIYITENGISTPGSESRCEAIADYKRINYLCSHLCFLRKVIREKGVNIRGYFAWALGDNYEFCKGFTVRFGLSYVNWDDLDDRNLKESGKWYQRFINGTAKNPVKQDFLRSSLSSQSQKKRLAC

SEQ ID NO: 390 - protein, 528 aa, Prunus serotina
  misc_feature: Public GI ID no.15778634
  misc_feature (23)..(494): Pfam Name: Glyco_hydro_1 Pfam Description: Glycosyl hydrolase family 1
AKTDPPIHCASLNRSSFDALEPGFIFGTASAAYQFEGAAKEDGRGPSIWDTYTHNHSERIKDGSNGDVAVDQYHRYKEDVRIMKKMGFDAYRFSISWSRVLPNGKVSGGVNEDGIKFYNNLINEILRNGLKPFVTIYHWDLPQALEDEYGGFLSPNIVDHFRDYANLCFKKFGDRVKHWITLNEPYTFSSSGYAYGVHAPGRCSAWQKLNCTGGNSATEPYLVTHHQLLAHAAAVKLYKDEYQASQNGLIGITLVSPWFEPASEAEEDINAAFRSLDFIFGWFMDPLTNGNYPHLMRSIVGERLPNFTEEQSKLLKGSFDFIGLNYYTTRYASNAPKITSVHASYITDPQVNATAELKGVPIGPMAASGWLYVYPKGIHDLVLYTKEKYNDPLIYITENGVDEFNDPKLSMEEALKDTNRIDFYYRHLCYLQAAIKKGSKVKGYFAWSFLDNFEWDAGYTVRFGINYVDYNDNLKRHSKLSTYWFTSFLKKYERSTKEIQMFVESKLEHQKFESQMMNKVQSSLAVVV

SEQ ID NO: 391 - protein, 553 aa, Prunus serotina
  misc_feature: Public GI ID no.16757966
  misc_feature (48)..(519): Pfam Name: Glyco_hydro_1 Pfam Description: Glycosyl hydrolase family 1
MATKLGSLLLCALLLAGFALTNSKAAKTDPPIHCASLNRSSFDALEPGFIFGTASAAYQFEGAAKEDGRGPSIWDTYTHNHSERIKDGSNGDVAVDQYHRYKEDVRIMKKMGFDAYRFSISWSRVLPNGKISGGVNEDGIKFYNNLINEILRNGLKPFVTIYHWDLPQALEDEYGGFLSPNIVDHFRDYANLCFKKFGDRVKHWITLNEPYTFSSSGYAYGVHAPGRCSAWQKLNCTGGNSATEPYLVTHHQLLAHAAAVKLYKDEYQASQNGLIGITLVSPWFEPASEAEEDINAAFRSLDFIFGWFMDPLTNGNYPHLMRSIVGERLPNFTEEQSKLLKGSFDFIGLNYYTTRYASNAPKITSVHASYITDPQVNATAELKGVPIGPMAASGWLYVYPKGIHDLVLYTKEKYNDPLIYITENGVDEFNDPKLSMEEALKDTNRIDFYYRHLCYLQAAIKKGSKVKGYFAWSFLDNFEWDAGYTVRFGINYVDYNDNLKRHSKLSTYWFTSFLKKYERSTKEIQMFVESKLEHQKFESQMMNKVQSSLAVVV

SEQ ID NO: 392 - protein, 514 aa, Lycopersicon esculentum
  misc_feature: Public GI ID no.17226270
  misc_feature (43)..(514): Pfam Name: Glyco_hydro_1 Pfam Description: Glycosyl hydrolase family 1
MKANPPCLILLLLISATVLTVHSDDDDDDVSPENTILDTGGLSRESFPKGFTFGTATSAYQVEGSASTEGRGPSIWDTFLKIPGLEPNNANGEIAVDQYHRYKEDIDLMAKLNFEAYRFSISWSRIFPNGTGKVNWKGVAYYNRLIDYMLKRGITPYANLNHYDLPQALQDRYNGWLGREVVKDFADYAEFCFKTFGDRVKNWFSFNEPRVVAALGYDNGFFAPGRCSKPFGNCTEGDSATEPYIVAHNLILCHASAAQRYREKYQEKQKGKFGILLDFVWYEPLTKGKADNYAAQRARDFHLGWFLHPLVYGEYPKTMQNIVGTRLPKFSKEEVKMVKGSFDYVGINQYTSYYMYDPHYTTPQPLGYQQDWNVGFAYDRKGVPIGPRAHSYWLYIVPWGLYKAINYVKEHYGNPTIILAENGMDYAGNITLPKALHDTKRINYYKSYLQQLKKTVDDGANVIGYFAWSLLDNFEWRLGYTSRFGIVYVDFNTLRRYPKMSAYWFKKLLKRQKH

SEQ ID NO: 393 - protein, 531 aa, Manihot esculenta
  misc_feature: Public GI ID no.249262
  misc_feature (30)..(514): Pfam Name: Glyco_hydro_1 Pfam Description: Glycosyl hydrolase family 1
MLVLFISLLALTRPAMGTDDDDDNIPDDFSRKYFPDDFIFGTATSAYQIEGEATAKGRAPSVWDIFSKETPDRILDGSNGDVAVDFYNRYIQDIKNVKKMGFNAFRMSISWSRVIPSGRRREGVNEEGIQFYNDVINEIISNGLEPFVTIFHWDTPQALQDKYGGFLSRDIVYDYLQYADLLFERFGDRVKPWMTFNEPSAYVGFAHDDGVFAPGRCSSWVNRQCLAGDSATEPYIVAHNLLLSHAAAVHQYRKYYQGTQKGKIGITLFTFWYEPLSDSKVDVQAAKTALDFMFGLWMDPMTYGRYPRTMVDLAGDKLIGFTDEESQLLRGSYDFVGLQYYTAYYAEPIPPVDPKFRRYKTDSGVNATPYDLNGNLIGPQAYSSWFYIFPKGIRHFLNYTKDTYNDPVIYVTENGVDNYNNESQPIEEALQDDFRISYYKKHMWNALGSLKNYGVKLKGYFAWSYLDNFEWNIGYTSRFGLYYVDYKNNLTRYPKKSAHWFTKFLNISVNANNIYELTSKDSRKVGKFYVM

SEQ ID NO: 394 - protein, 527 aa, Hevea brasiliensis
  misc_feature: Public GI ID no.28628597
  misc_feature (27)..(510): Pfam Name: Glyco_hydro_1 Pfam Description: Glycosyl hydrolase family 1
MLVLLISFLALTKPAMADYDGIPADFNRSYFPDDFIFGTATSAYQIEGAANILGRGPSVWDTFTHESPKRIKDQSNGDVAVDFYNRFEEDIKNVKDMGFDAFRFSISWSRVIPSGRRHEGVNEGGIEFYNTVINETIKQGLRPFVTIFHWDTPQALEDKYGGFLSRDIVKDFREYADLLFERFGDRVKHWMTFNEPWALSGFAYDYGVFAPGRCSSWVNRRCRAGNSATEPYIVAHHLLLSHAAVVQIYRENYQTTQNGKIGITLFTFWFEPLSNRTIDIEASRTALDFMFGLWMDPLTYGRYPRTVRDLIGDRLLKFTDEETQMLRGSYDFVGIQYYTSYFAKPNAAIDPNHRRYKTDSQIIETPYDYDGNLIGPQAYSPWFYIFPQGIRHLLNYTKDTYNNPVIYITENGVDNLNNETESIDEALQDEFRVNYYRKHMWNALGSLKEYNVNIKGYFAWSYLDNFEWNIGYTSRFGLFYVDYKKNLTRIPKSSAFWFAAFLNPESSKKITQTTSRNSRKVGKFYIM

SEQ ID NO: 395 - protein, 507 aa, Camellia sinensis
  misc_feature: Public GI ID no.32400332
  misc_feature (35)..(504): Pfam Name: Glyco_hydro_1 Pfam Description: Glycosyl hydrolase family 1
MMAAKGSVVVGVLAIVAYALVVSEVAIAAQISSFNRTSFPDGFVFGAASSAYQFEGAAKEGGKGPNIWDTFTHEFPGKISNGSTGDVADDFYHRYKEDVKVLKFIGLDGFRMSISWARVLPRGKLSGGVNKEGIAFYNNVINDLLSKGIQPFITIFHWDLPQALEDEYGGFLSPHIVNDFRDFAELCFKEFGDRVKHWITMNEPWSYSYGGYDAGLLAPGRCSAFMAFCPKGNSGTEPYIVTHNLLLSHAAAVKLYKEKYQAYQKGQIGITLVTYWMIPYSNSKADKDAAQRALDFMYGWFIEPLSFGEYPKSMRRLVGKRLPRFTKEQAMLVKGSFDFLGLNYYIANYVLNVPTSNSVNLSYTTDSLSNQTAFRNGVAIGRPTGVPAFFMYPKGLKDLLVYTKEKYNDPVIYITENGMGDNNNVTTEEGIKDPQRVYFYNQHLLSLKNAIAAGVKVKGYFTWAFLDNFEWLSGYTQRFGIVYVDFKDGLKRYPKHSALWFKKFLLK

SEQ ID NO: 396 - protein, 547 aa, Brassica juncea
  misc_feature: Public GI ID no.4033345
  misc_feature (41)..(524): Pfam Name: Glyco_hydro_1 Pfam Description: Glycosyl hydrolase family 1
HELLHGLALVFLLAASSCKADEEITCEENTPFTCGNTDILSSKNFGKDFIFGVASSAYQIEGGRGRGVNIWDGFSHRYPEKSGSDLMNGDTTCESYTRWQKDVDIMGELNATGYRFSFAWSRIIPKGKVSRGVNQGGLDYYHQLIDALLEKNITPFVTLFHWDLPQTLQDEYEGFLDRQIIQDFKDYADLCFNEFGGKVKHWITINQLYTVPTRGYASGTDAPGRCSYMVDTKHRCYGGNSSTEPYIVAHNQLLAHAAVVDLYRTKYKFQNGKIGPVMITRWFLPFDESDPACVEAAERMNQFFHGWYMEPLTKGRYPDIMRQIVGSRLPNFTEEEAALVAGSYDFLGLNYYVTQYAQPQPNPYPSETHTAMMDPGVKLTYNNSRGELLGPLFAEDKVNGNSYYYPKGMYYVMDFFKTNYSNPLIYITENGISSPGTENRCEAIADYKRIDYLCSHLCFLRKVIREKGVNVRGYFAWALGDNYEFCKGFTVRFGLSYVNWDDLDDRNLKESGKWYQRFINGTVKNHANQDFLRSSLSSQSQKKRLAC

SEQ ID NO: 397 - protein, 544 aa, Brassica napus
  misc_feature: Public GI ID no.414103
  misc_feature (41)..(520): Pfam Name: Glyco_hydro_1 Pfam Description: Glycosyl hydrolase family 1
MKLLHGLALVFLLAAASCKADEEITCEENNPFTCSNTDILSSKNFGKDFLFGVASSAYQACRGVNVWDGFSHRYPEKSGSDLKNGDTTCESYTRWQKDVDVMGELNATGYRFSFAWSRIIPKGKVSRGVNQGGLDYYHKLIDALLEKNITPFVTLFHWDLPQTLQDEYEGFLDRQIIQDFKDYADLCFKEFGGKVKHWITINQLYTVPTRGYAVGTDAPGRCSPMVDTKHRCYGGNSSPEPYIVAHNQLLAHATVVDLYRTKYKFQKGKIGPVMITRWFLPFDESDPASIEAAERMNQFFHGWYMEPLTKGRYPDIMRQIVGSRLPNFTEEEAELVAGSYDFLGLNYYVTQYAQPKPNPYPSETHTAMMDAGVKLTYDNSRGEFLGPLFVEDEVNGNSYYYPKGIYYVMDYFKTKYGDPLIYVTENGFSTPSSENREQAIADYKRIDYLCSHLCFLRKVIKEKGVNVRGYFAWALGDNYEFCKGFTVRFGLSYVNWEDLDDRNLKESGKWYQRFINGTVKNSAKQDFLRSSLSSQSQKKKLADA

SEQ ID NO: 398 - protein, 504 aa, Oryza sativa subsp. japonica
  misc_feature: Public GI ID no.54290938
  misc_feature (29)..(504): Pfam Name: Glyco_hydro_1 Pfam Description: Glycosyl hydrolase family 1
MELLWLLLLLLMASSTSSRSEMKAGEVIRRSQFPEDFFFGTASSAYQYEGAVREGGRGPSIWDTFTHNHPEKIANGSNGDIAIDSYHRYKEDVGIMKGLGLNAYRFSVSWPRILPNGKLSGGVNLEGIKYYNNLIDELISKGVEPFVTLFHWDSPQALEQQYGGFLSNLIVEDFRDYADICFREFGDRVKYWITFNEPWSFSIGGYSNGILAPGRCSSQGKSGCSKGDSGREPYIVAHNQLLAHAAVVQIYREKYQGGQKGKIGIAIVSNWMIPYEDSKEDKHATKRALDFMYGWFMDPLTKGDYPVSMRTLVGNRLPRFTKEQSKAINGSFDFIGLNYYTARYIQGTKQDSNSHKSYSTDSLTNERVERNGTDIGPKAGSSWLYIYPKGIEELLLYTKRTYNNPTIYITENGVDEVNNENLSLKEALIDTTRIEFYRQHLFHVQRALRQGVDVRGYFAWSLFDNFEWMDGYSVRFGINYIDYKDGLKRYPKRSSQWLQNFLHN

SEQ ID NO: 399 - protein, 531 aa, Dalbergia nigrescens
  misc_feature: Public GI ID no.54401705
  misc_feature (41)..(514): Pfam Name: Glyco_hydro_1 Pfam Description: Glycosyl hydrolase family 1
MIAMTFKVILLLGLLALISTSTSIAFPKEVRATITEVPPFNRSCFPSDFIFGASSSAYQYEGEGRVPSIWDNFTHQYPEKIADGSNGDVTIDQFHRYKEDVAIMKYMNLDAYRLSISWPRILPTGRASGGINSTGVDYYNRLINETLHNGITPYVTIFHWDLPQALEDEYGGFLDRRVVNDFRDYADLCFKFFGDRVKHWITINEPQVFTTNGYTYGMFAPGRCSPSYDPTCTGGDAGTEPYKVAHNLLLSHAATVQVYKEKYQKDQNGKIGITLDQRWVIPLSNSTSDKKAAQRYLDFTFGWFMDPLTVGRYPDSMQYLVGNRLPKFTTYEAKLVKGSFDFIGINYYTSNYATKSDASTCCPPSYLTDPQVTLSSQRNGVFIGPMTPSGWICIYPKGLRDLLLYIKENYNNPLVYITENGMDETNDPSLSLEESLMDTYRIDSYYRHLFYVLSAIKSGANVKGFFAWTLMDDFEWSGGFTSRFGLNFVDYNTLNRYPKLSAKWFKYFLTRDQESAKLDISTPKASAAYQR

SEQ ID NO: 400 - protein, 538 aa, Armoracia rusticana
  misc_feature: Public GI ID no.56112345
  misc_feature (38)..(514): Pfam Name: Glyco_hydro_1 Pfam Description: Glycosyl hydrolase family 1
MKLLGIALVLLLAVVTCKAEITCEEDKPFTCNQTERLNRNHFDPDFIFGFASSAYQIEGSRGRGINTWDAFTHRYPEKGGADLGNGDTTCGSYEHWQKDIDVMAELGVNGYRFSFAWSRIVPRGKVSRGINQDGVNYYNNLIDGLLEKNITPFATLYHWDLPQCLQDEYEGFLDREIIEDFKNYADLCFQLFGDRVKNWITINQLFTVPTRGYATGTDAPGRCSSWLNKGCYAGDSGTEPYIVAHNQLLAHATAVDLYRKKYKKEQGGQIGPVMITRWFLPYDDTQASKDAVERNKAFFLGWFMEPLTKGKYPDIMRKLVGDRLPKFTESESKLVKGSFDFLGLNYYYTQYVYAIPKNPPNRLTVMNDSLSALSFVNKDGPIGPWFNADIYYRPRGILDTMEYFKTKYDNPLVYITENGYSSAGGDTPFEEVIADYNRTDFLCSHLCFLRKAIKESGCNVKGYFVWSLGDNYEFCQGFTVRFGVSYIDFKNITADRDLKESGKWYKRFLSVKDNKVPHESQDLLRSRFFLGQKKVADA

SEQ ID NO: 401 - protein, 550 aa, Brassica rapa subsp. pekinensis
  misc_feature: Public GI ID no.56130949
  misc_feature (43)..(526): Pfam Name: Glyco_hydro_1 Pfam Description: Glycosyl hydrolase family 1
LTMKLLHGLALVFLLAAASCKADEEITCEENNPFTCSNTDILSSKNFGKDFIFGVASSAYQIEGGRGRGVNIWDGFSHRYPEKSGSDLKNGDTTCESYTRWQKDVDVMGELNATGYRFSFAWSRIIPKGKVSRGVNQGGLDYYHKLLDALLEKNITPFVTLFHWDLPQTLQDEYEGFLDRQIIQDFKDYADLCFKEFGGKVKHWITINQLYTVPTRGYAVGTDAPGRCSPMVDTKHRCYGGNSSTEPYIVAHNQLLAHATVVDLYRTKYKFQKGKIGPVMITRWFLPFDESDPASIEAAERMNQFFHGWYMEPLTKGRYPDIMRQIVGSRLPNFTEEEAELVAGSYDFLGLNYYVTQYAQPKPNPYPSETHTAMMDAGVKLTYDNSRGEFLGPLFVEDKVNGNSYYYPKGIYYVMDYFKTKYGDPLIYVTENGFSTPSSENREQAIADYKRIDYLCSHLCFLRKVIKEKGVNVRGYFAWALGDNYEFCKGFTVRFGLSYVNWEDLDDRNLKESGKWYQRFINGTVKNAVKQDFLRSSLSSQSQKKRFADA

SEQ ID NO: 402 - protein, 548 aa, Brassica rapa subsp. pekinensis
  misc_feature: Public GI ID no.56130951
  misc_feature (41)..(524): Pfam Name: Glyco_hydro_1 Pfam Description: Glycosyl hydrolase family 1
MKLLHGLALVFLLAAASCKADEEITCEENNPFTCSNTDILSSKNFGKDFIFGVASSAYQIEGGRGRGVNIWDGFSHRYPEKSGSDLKNGDTTCESYTRWQKDVDVMGELNATGYRFSFAWSRIIPKGKVSRGVNQGGLDYYHKLIDALLEKNITPFVTLFHWDLPQTLQDEYEGFLDRQIIQDFKDYADLCFKEFGGKVKHWITINQLYTVPTRGYAVGTDAPGRCSPMVDTKHRCYGGNSSTEPYIVAHNQLLAHATVVDLYRTKYKFQKGKIGPVMITRWFLPFDESDPASIEAAERMNQFFHGWYMEPLTKGRYPDIMRQIVGSRLPNFTDQEAALVAGSYDFLGLNYYVTQYAQPKPNPYPSETHTAMMDAGVKLTYDNSRGEFLGPLFVEDKVNGNSYYYPKGIYYVMDYFKTKYGDPLIYVTENGFSTPSEENREQAIADYKRIDYLCSHLCFLRKVIKEKGVNVRGYFAWALGDNYEFCKGFTVRFGLSYVNWEDLDDRNLKESGKWYQRFINGTVKNAVKQDFLRSSLSSQSQKKRFADA

SEQ ID NO: 403 - protein, 540 aa, Rauvolfia serpentina
  misc_feature: Public GI ID no.6103585
  misc_feature (18)..(513): Pfam Name: Glyco_hydro_1 Pfam Description: Glycosyl hydrolase family 1
MATQSSAVIDSNDATRISRSDFPADFIMGTGSSAYQIEGGARDGGRGPSIWDTFTHRRPDMIRGGTNGDVAVDSYHLYKEDVNILKNLGLDAYRFSISWSRVLPGGRLSGGVNKEGINYYNNLIDGLLANGIKPFVTLFHWDVPQALEDEYGGFLSPRIVDDFCEYAELCFWEFGDRVKHWMTLNEPWTFSVHGYATGLYAPGRGRTSPEHVNHPTVQHRCSTVAPQCICSTGNPGTEPYWVTHHLLLAHAAAVELYKNKFQRGQEGQIGISHATQWMEPWDENSASDVEAAARALDFMLGWFMEPITSGDYPKSMKKFVGSRLPKFSPEQSKMLKGSYDFVGLNYYTASYVTNASTNSSGSNNFSYNTDIHVTYETDRNGVPIGPQSGSDWLLIYPEGIRKILVYTKKTYNVPLIYVTENGVDDVKNTNLTLSEARKDSMRLKYLQDHIFNVRQAMNDGVNVKGYFAWSLLDNFEWGEGYGVRFGIIHIDYNDNFARYPKDSAVWLMNSFHKNISKLPAVKRSIREDDEEQVSSKRLRK

SEQ ID NO: 404 - protein, 547 aa, Dalbergia cochinchinensis
  misc_feature: Public GI ID no.6118076
  misc_feature (41)..(514): Pfam Name: Glyco_hydro_1 Pfam Description: Glycosyl hydrolase family 1
MLAMTSKAILLLGLLALVSTSASIDFAKEVRETITEVPPFNRSCFPSDFIFGTASSSYQYEGEGRVPSIWDNFTHQYPEKIADRSNGDVAVDQFHRYKKDIAIMKDMNLDAYRMSISWPRILPTGRVSGGINQTGVDYYNRLINESLANGITPFVTIFHWDLPQALEDEYGGFLNHSVVNDFQDYADLCFQLFGDRVKHWITLNEPSIFTANGYAYGMFAPGRCSPSYNPTCTGGDAGTETYLVAHNLILSHAATVQVYKRKYQEHQKGTIGISLHVVWVIPLSNSTSDQNATQRYLDFTCGWFMDPLTAGRYPDSMQYLVGDRLPKFTTDQAKLVKGSFDFIGLNYYTTNYATKSDASTCCPPSYLTDPQVTLLQQRNGVFIGPVTPSGWMCIYPKGLRDLLLYFKEKYNNPLVYITENGIDEKNDASLSLEESLIDTYRIDSYYRHLFYVRYAIRSGANVKGFFAWSLLDNFEWAEGYTSRFGLYFVNYTTLNRYPKLSATWFKYFLARDQESAKLEILAPKARWSLSTMIKEEKTKPKRGIEGF

SEQ ID NO: 405 - protein, 548 aa, Brassica rapa var. parachinensis
  misc_feature: Public GI ID no.62131643
  misc_feature (41)..(524): Pfam Name: Glyco_hydro_1 Pfam Description: Glycosyl hydrolase family 1
MKLLHGLALVFLLAGASCKADEEITCEENNPFTCSNTDILSSKNFGKDFIFGVASSAYQIEGGRGRGVNIWDGFSHRYPEKSGSDLKNGDTTCESYTRWQKDVDVMGELNATGYRFSFAWSRIIPKGKVSRGVNQGGLDYYHKLIDALLEKNITPFVTLFHWDLPQTLQDEYEGFLDRQIIQDFKDYADLCFKEFGGKVKHWITINQLYTVPTRGYAVGTDAPGRCSPMVDTKHRCYGGNSSTEPYIVAHNQLLAHATVVDLYRTKYKFQKGKIGPVMITRWFLPFDESDPASIEAAERMNQFFHGWYMEPLTKGRYPDIMRQIVGSRLPNFTEEEAELVAGSYDFLGLNYYVTQYAQPKPNPYPSETHTAMMDAGVKLTYDNSRGEFLGPLFVEDKVNGNSYYYPKGIYYVMDYFKTKYGDPLIYVTENGFSTPSSENREQAIADYNRIDYLCSHLCFLRKVIKEKGVNVRGYFAWALGDNYEFCKGFTVRFGLSYVNWEDLDDRNLKESGKWYQRFINGTVKNAVKQDFLRSSLSSQSQKKRFADA

SEQ ID NO: 406 - protein, 555 aa, Catharanthus roseus
  misc_feature: Public GI ID no.6840855
  misc_feature (47)..(531): Pfam Name: Glyco_hydro_1 Pfam Description: Glycosyl hydrolase family 1
MGSKDDQSLVVAISPAAEPNGNHSVPIPFAYPSIPIQPRKHNKPIVHRRDFPSDFILGAGGSAYQCEGAYNEGNRGPSIWDTFTNRYPAKIADGSNGNQAINSYNLYKEDIKIMKQTGLESYRFSISWSRVLPGGNLSGGVNKDGVKFYHDFIDELLANGIKPFATLFHWDLPQALEDEYGGFLSDRIVEDFTEYAEFCFWEFGDKVKFWTTFNEPHTYVASGYATGEFAPGRGGADGKGEPGKEPYIATHNLLLSHKAAVEVYRKNFQKCQGGEIGIVLNSMWMEPLNETKEDIDARERGLDFMLGWFIEPLTTGEYPKSMRALVGSRLPEFSTEVSEKLTGCYDFIGMNYYTTTYVSNADKIPDTPGYETDARINKNIFVKKVDGKEVRIGEPCYGGWQHVVPSGLYNLLVYTKEKYHVPVIYVSECGVVEENRTNILLTEGKTNILLTEARHDKLRVDFLQSHLASVRDAIDDGVNVKGFFVWSFFDNFEWNLGYICRYGIIHVDYKTFQRYPKDSAIWYKNFISEGFVTNTAKKRFREEDKLVELVKKQKY

SEQ ID NO: 407 - protein, 545 aa, Wasabia japonica
  misc_feature: Public GI ID no.71361195
  misc_feature (40)..(525): Pfam Name: Glyco_hydro_1 Pfam Description: Glycosyl hydrolase family 1
MKLHGLALVFLLAVATCKAVEDITCQEKEPFTCSNTDSLNSKSFGKDFIFGVASSAYQIEGGRGRGPNTWDAFTHRYPEKGGPDLANGDTTCESYTNWQKDIDIMDELNATGYRFSFAWSRIIPKGKVSRGVNQGGLDYYHQLIDGLIAKKITPFVTLYHWDLPQTLQDEYEGFLNRTIIDDFRDYADLCFKEFGGKVKHWITINQLYTVPTRGYGIATDAPGRCSPAIDKRCYGGNSSTEPYIVAHNQLLAHAAVVNLYRTKYKFQGGKIGTVMITRWFLPFDENDKDCIDATERMKEFFFGWFMEPLTKGRYPDIMRKIVGSKLPNFTEAEARQVAGSYDFLGLNYYVTQYAQPTKTIVPPENHTAMMDANVTLTYVNSRGELIGPLFAKDDDPKKNSYYYPKGIYFVMDHFRTRYFNPLIYVTENGISSPGTEPREVAIADSKRIDYLCSHLCFLRKVIKETGVNVKGYFAWSLGDNYEFCKGFTVRFGLSYVNWTDVTDRNLKDSGKWYQRFINVTTNNPPAKQDFLRSSLSFHNKNLADA

SEQ ID NO: 408 - protein, 479 aa, Arabidopsis lyrata subsp. lyrata
  misc_feature: Public GI ID no.74473455
  misc_feature (22)..(473): Pfam Name: Glyco_hydro_1 Pfam Description: Glycosyl hydrolase family 1
KGEEFTCEENEPFTCDQTKLFNSGSFEKDFIFGVSSSAYQVEGGRGRGLNVWDGFTHRFPEKGGPDLGNGDTTCDSYTNWHKDIDVIDELNATGYRFSFAWSRILPKGKRSRGVNEGGIDYYNRLIDNMIARNITPFVTLFHWDLPQTLQDEYNGFLNRTIIDDFKDYADLCFEKFGDRVKNWITINQLYTVPTRGYAIGTDAPGRCSPKIDKRCPGGNSSTEPYLVAHNQLLAHAAAVDVYKTKYKDQGGKIGPVMITRWFLPFDDTPESKAATERAKEFFHGWFMGPLTEGKYPDIMRKLVGKRLPEFTETETALVKGSYDFLGLNYYVTQYAQNNDAIVPPDVHTAMMDSRATLTSRNATGHAPGPPFAKDSYYYPKGIYYVMEYYKNKYGDPLIYITENGISTPGDESFDEALADYKRIDYLCSHLCFLSKVIKEKAVNVKGYFAWALGDNYEFGNGFTVRFGLSYIDFANVTGD

SEQ ID NO: 409 - protein, 491 aa, Oncidium cv. 'Gower Ramsey'
  misc_feature: Public GI ID no.84316715
  misc_feature (24)..(491): Pfam Name: Glyco_hydro_1 Pfam Description: Glycosyl hydrolase family 1
MNPFFALLFFFFFFFARTDAGGLNRDKFPVGFTFGTAASAYQVEGMALKDGRGPSIWDDFVKIPGEIKNNATAAVTVDEYHRYKVDINIMKNMNFDAYRFSISWSRIFPNGSGKVNWKGVAYYNRLIDYMLQQGITPFANLYHYDLPDALEKSYNGLLSRNVVKDYADYAEFCFKTFGDRVKNWFTFNEPRVVAALGYDNGIFAPGRCTGCTAGGNSTTEPYIVAHNLILSHAAALKRYRDKYQVSQKGRIGILLDFVWYEPLTNSTDDEAAAQRARDFHIGWFLHPIIYGEYPKSVQDIVKERLPTFTAEEISLVKGSVDYLGVNQYTSYYMFDPHLPTQTSTGYQTDWNVGFAYERNGVPIGPRANSEWLYIVPWGMYKAVTYVKENYQNPTIILSENGMDDPGNVSLKVGLHDTTRLNYYKSYISELKRAIDDGATVIGYFAWSLLDNFEWKSGYTSRFGIVYVDFKTLKRYPKMSAYWFRDVLQKKK

SEQ ID NO: 410 - protein, 501 aa, Oncidium cv. 'Gower Ramsey'
  misc_feature: Public GI ID no.84316796
  misc_feature (34)..(501): Pfam Name: Glyco_hydro_1 Pfam Description: Glycosyl hydrolase family 1
MNPFFLLIFLFPRTSQPVAAAPVAGSRTDAGGLNRDNFPVGFTFGTAASAYQVEGMALKDGRGPSIWDEFIKIPGEIKNNATAAVTVDEYHRYKVDIDIMKNMNFDAYRFSISWSRIFPNGSGKVNWKGVAYYNRLIDYMLQQGITPFANLYHYDLPEALEKSYNGLLSRNVVKDYADYAEFCFKTFGDRVKNWFTFNEPRVVAALGYDNGIFAPGRCTGCTAGGNSTTEPYIVAHNLILSHAAAVKRYRDKYHVSQKGRIGILLDFVWYEPLTNSTDDEAAAQRARDFHIGWFLHPIIYGEYPKSVQDIVKERLPTFTAEEISIVKGSVDYLGVNQYTSYYMFDPHLPTQTSTGYQTDWNVGFAYERDGVPIGPRANSDWLYIVPWGMYKAVTYVKENYQNPTIILSENGMDDPGNVSLTVGVHDATRLNYYKSYISELKRAIDDGATVIGYFAWSLLDNFEWKLGYTSRFGIVYVDFKTLKRYPKMSAYWFKDVLQKKK

SEQ ID NO: 411 - protein, 491 aa, Oncidium cv. 'Gower Ramsey'
  misc_feature: Public GI ID no.84316817
  misc_feature (24)..(491): Pfam Name: Glyco_hydro_1 Pfam Description: Glycosyl hydrolase family 1
MNPFFALLFFFFFFFARTDAGGLNRDKFPVGFTFGTAASAYQVEGMALKDGRGPSIWDDFVKIPGEIKNNATAAVTVDEYHRYKVDINIMKNMNFDAYRFSISWSRIFPNGSGKVNWKGVAYYNRLIDYMLQQGITPFANLYHYDLPDALEKSYNGLLSRNVVKDYADYAEFCFKTFGDRVKNWFTFNEPRVVAALGYDNGIFAPGRCTGCTAGGNSTTEPYIVAHNLILSHAAAVKRYRDKYQVSQKGRIGILLDFVWYEPLTNSTDDEAAAQRARDFHIGWFLHPIIYGEYPKSVQDIVKERLLTFTAEEISLVKGSVDYLGVNQYTSYYMFDPHLPTQTSTGYQTDWNVGFAYERNGVPIGPRANSEWLYIVPWGMYKAVTYVKENYQNPTIILSENGMDDPGNVSLKVGLHDTTRLNYYKSYISELKRAIDDGATVIGYFAWSLLDNFEWKSGYTSRFGIVYVDFKTLKRYPKMSAYWFRDVLQKKK

SEQ ID NO: 412 - protein, 511 aa, Medicago truncatula
  misc_feature: Public GI ID no.92881003
  misc_feature (35)..(507): Pfam Name: Glyco_hydro_1 Pfam Description: Glycosyl hydrolase family 1
MALLKAFLIFTLLNLLTTLPSMEAVSPILDVSSLNRTSFPTSFIFGTGSSSYQYEGAAKEGGRGASIWDTYTHKYPEKIRDKSNGDVAIDQYYRYKEDVGIMRNMNLDAYRFSISWSRIVPKGKLNGGINQEGVKYYNNLINELLANGLQPFVTLFHWDLPQTLEDEYGGFLSPLIVNDFQDYAELCFKEFGDRVKYWTTFNEPYAFSNFAYTLGFFAPGRCSKWFSSNCTGGDSGKEPYIVSHHQLLAHAAVVHVYKKKYQESQKGVIGITLASHWFLPLSDKKLDQNAVERGLDFMLGWFMEPLTTGKYPQSMHCLVGKRLPKFSKKQARLLKGSFDFVGLNYYTSMYATNAPQPKNGRLSYDTDSHVNFTSERNGVPIGQRAASNWLYVYPKGIQELLLYVKKVYNNPLIYITENGIDEFNDPTLSLEEALMDTYRIDYYHRHLFYIRSAIKNGVNVKGYFAWSLLDNFEWTSGYTTRFGMNFVDYKNGLKRHPKLSAKWFKNFLKRY

SEQ ID NO: 413 - DNA, 1710 bp, Glycine max
  misc_feature: Ceres CLONE ID no. 590462_FL
  misc_feature: The sequence encodes the protein given in SEQ ID NO 414
acagaaaatggactcgaacggctacttggtagttggagtggtagcttttgctctactttgctcattcagagtttctttgacagattcagttccattattttcgcctgttcatgacgctgcttctttgactcgcaactctttccctgctggcttcatctttggggctggatcctcagcctaccagttcgaaggagcagcaaaggaaggtggaagaggaccaagcatatgggataccttcacacataaccatccagaaaagataagagatggagccaatggagatgtcgccgttgaccaatatcaccgctacaaggaagatgttaagatcatgaaggatatgaatttggattcatacagattctcaatctcttggcctagaatactacccaaaggaaagctcagtggtggtgtaaatcaagaaggaatcaattattacaacaacctcatcaatgagctattggctaatggtgtactgccatatgtgactctttttcattgggatcttccccaagctttggaagatgagtatggtggtttcttaagctcccatatagtccagggtggctatgcaaccggagcgacggcaccaggaagatgtaccggtccacaatgcctcggtggtgatgctggcactgaaccttacatagttacacacaatcaaattcttgctcatgcagctgctgttcatgtgtacaagactaagtatcaggcacatcagaaaggcaagataggtataacgttggtaagtaactggttcataccgcttgcagagaatagcacatcagacataaaggctgcgagaagggcaattgactttcaatatggatggtatatggaaccattaacaaaaggagagtatcctaaaaacatgcgagccctggtgggaagtagattgcctaagttcaccaaatggcaagccaagctagtgaatggatcatttgattttattggcttaaactattactcctctggttatattaatggtgtccctccaagcaacgacaaacccaattttctaacagattctcgcaccaacacttcatttgaacgcaatggaagacccctaggtctaagggccgcttcagtttggatatacttttatccaaggggacttctagatcttctgttatataccaaggaaaaatacaataaccctttgatttacatcaccgaaaatggtatgaacgaattcaatgatccaaccctttccgtggaagaagctctcatggatatttatcgaattgattattattatcgtcatttcttttatcttcgatcagcaattaaggctggcgcaaacgttaagggattttttgcatggtcatttttggactgtaatgaatggtttgcagggttcactgttcggtttggattaaactttgtagattacaaagatggcttaaaaaggtaccctaagctttctgctcaatggtacaaraactttctgaaaagaaactagtgttagacccaccgtttgaaagctatgcagcacctaaaaacggttaggttaagctcaatgtttgtagttgtagctaattccacgtataagtcattaggttgttgttttctgttagaataatttcatggcacactactaagtgtcctgcaccagcacagctataaattaatatgttatagctgatccttcatgtatcggtttgattttgaatgttatctcagaattaagattcagtttcagtttcaacaatt

SEQ ID NO: 414 - protein, 483 aa, Glycine max
  misc_feature: Ceres CLONE ID no. 590462_FL
  misc_feature (477)..(477): Xaa can be any naturally occurring amino acid
MDSNGYLVVGVVAFALLCSFRVSLTDSVPLFSPVHDAASLTRNSFPAGFIFGAGSSAYQFEGAAKEGGRGPSIWDTFTHNHPEKIRDGANGDVAVDQYHRYKEDVKIMKDMNLDSYRFSISWPRILPKGKLSGGVNQEGINYYNNLINELLANGVLPYVTLFHWDLPQALEDEYGGFLSSHIVQGGYATGATAPGRCTGPQCLGGDAGTEPYIVTHNQILAHAAAVHVYKTKYQAHQKGKIGITLVSNWFIPLAENSTSDIKAARRAIDFQYGWYMEPLTKGEYPKNMRALVGSRLPKFTKWQAKLVNGSFDFIGLNYYSSGYINGVPPSNDKPNFLTDSRTNTSFERNGRPLGLRAASVWIYFYPRGLLDLLLYTKEKYNNPLIYITENGMNEFNDPTLSVEEALMDIYRIDYYYRHFFYLRSAIKAGANVKGFFAWSFLDCNEWFAGFTVRFGLNFVDYKDGLKRYPKLSAQWYXNFLKRN

SEQ ID NO: 415 - protein, 69 aa, Artificial sequence
  misc_feature: Public GI ID no.114974_T
  misc_feature: The sequence is a truncated version of Public GI ID no.114974
  misc_feature: Functional Homolog of Ceres CLONE ID no. 590462 at SEQ ID NO. 80
MDFIVAIFALFVISSFTITSTNAVEASTLLDIGNLSRSSFPRGFIFGAGSSAYQFEGAVNEGGRGPSIW

SEQ ID NO: 416 - protein, 68 aa, Artificial sequence
  misc_feature: Public GI ID no.92881003_T
  misc_feature: The sequence is a truncated version of Public GI ID no.92881003
  misc_feature: Functional Homolog of Ceres CLONE ID no. 590462 at SEQ ID NO. 80
MALLKAFLIFTLLNLLTTLPSMEAVSPILDVSSLNRTSFPTSFIFGTGSSSYQYEGAAKEGGRGASIW

SEQ ID NO: 417 - protein, 62 aa, Artificial sequence
  misc_feature: Public GI ID no.54290938_T
  misc_feature: The sequence is a truncated version of Public GI ID no.54290938
  misc_feature: Functional Homolog of Ceres CLONE ID no. 590462 at SEQ ID NO. 80
MELLWLLLLLLMASSTSSRSEMKAGEVIRRSQFPEDFFFGTASSAYQYEGAVREGGRGPSIW

SEQ ID NO: 418 - protein, 74 aa, Artificial sequence
  misc_feature: Public GI ID no.16757966_T
  misc_feature: The sequence is a truncated version of Public GI ID no.16757966
  misc_feature: Functional Homolog of Ceres CLONE ID no. 590462 at SEQ ID NO. 80
MATKLGSLLLCALLLAGFALTNSKAAKTDPPIHCASLNRSSFDALEPGFIFGTASAAYQFEGAAKEDGRGPSIW

SEQ ID NO: 419 - protein, 67 aa, Artificial sequence
  misc_feature: Ceres ANNOT ID no.1490788_T
  misc_feature: The sequence is a truncated version of Ceres ANNOT ID no.1490788
  misc_feature: Functional Homolog of Ceres CLONE ID no. 590462 at SEQ ID NO. 80
MATQSYVLCILILGLVASNIVASTTPSHEIHSFNRQSFPPGFIFGAASAAYQYEGAAFQDGKGLSIW

SEQ ID NO: 420 - protein, 70 aa, Artificial sequence
  misc_feature: Public GI ID no.54401705_T
  misc_feature: The sequence is a truncated version of Public GI ID no.54401705
  misc_feature: Functional Homolog of Ceres CLONE ID no. 590462 at SEQ ID NO. 80
MIAMTFKVILLLGLLALISTSTSIAFPKEVRATITEVPPFNRSCFPSDFIFGASSSAYQYEGEGRVPSIW

SEQ ID NO: 421 - protein, 67 aa, Artificial sequence; identical to SEQ ID NO: 419
  misc_feature: Ceres ANNOT ID no.1437978_T
  misc_feature: The sequence is a truncated version of Ceres ANNOT ID no.1437978
  misc_feature: Functional Homolog of Ceres CLONE ID no. 590462 at SEQ ID NO. 80

SEQ ID NO: 422 - protein, 70 aa, Artificial sequence
  misc_feature: Public GI ID no.6118076_T
  misc_feature: The sequence is a truncated version of Public GI ID no.6118076
  misc_feature: Functional Homolog of Ceres CLONE ID no. 590462 at SEQ ID NO. 80
MLAMTSKAILLLGLLALVSTSASIDFAKEVRETITEVPPFNRSCFPSDFIFGTASSSYQYEGEGRVPSIW

SEQ ID NO: 423 - protein, 68 aa, Artificial sequence
  misc_feature: Public GI ID no.32400332_T
  misc_feature: The sequence is a truncated version of Public GI ID no.32400332
  misc_feature: Functional Homolog of Ceres CLONE ID no. 590462 at SEQ ID NO. 80
MMAAKGSVVVGVLAIVAYALVVSEVAIAAQISSFNRTSFPDGFVFGAASSAYQFEGAAKEGGKGPNIW

SEQ ID NO: 424 - protein, 68 aa, Artificial sequence
  misc_feature: Public GI ID no.110623260_T
  misc_feature: The sequence is a truncated version of Public GI ID no.110623260
  misc_feature: Functional Homolog of Ceres CLONE ID no. 590462 at SEQ ID NO. 80
MMAAKGSVVVGVLAIVAYAFVVSEVAIAAQISSFNRTSFPDGFVFGIASSAYQFEGAAKEGGKGPNIW

SEQ ID NO: 425 - protein, 65 aa, Artificial sequence
  misc_feature: Ceres CLONE ID no.1777157_T
  misc_feature: The sequence is a truncated version of Ceres CLONE ID no.1777157
  misc_feature: Functional Homolog of Ceres CLONE ID no. 590462 at SEQ ID NO. 80
MGARTGMAAKRLLSSVLLVAALACDGTHAKFSRHSFPKDFIFGTGSAAYQYEGAYKEGGKGLSIW

SEQ ID NO: 426 - protein, 68 aa, Artificial sequence
  misc_feature: Ceres CLONE ID no.732610_T
  misc_feature: The sequence is a truncated version of Ceres CLONE ID no.732610
  misc_feature: Functional Homolog of Ceres CLONE ID no. 590462 at SEQ ID NO. 80
MGKRQVLPALLLALLALASSGGGAHPATPVKAPFSRHSFPKGFVFGTGSAAYQYEGAVKEGGRGPTVW

SEQ ID NO: 427 - protein, 61 aa, Artificial sequence
  misc_feature: Ceres CLONE ID no.1926430_T
  misc_feature: The sequence is a truncated version of Ceres CLONE ID no.1926430
  misc_feature: Functional Homolog of Ceres CLONE ID no. 590462 at SEQ ID NO. 80
MVLKGIALPIITLLLALGIQAGFSQNISKASFPKGFIFGTASSAFQYEGAVKEDGRGPTIW

SEQ ID NO: 428 - protein, 80 aa, Artificial sequence
  misc_feature: Public GI ID no.6840855_T
  misc_feature: The sequence is a truncated version of Public GI ID no.6840855
  misc_feature: Functional Homolog of Ceres CLONE ID no. 590462 at SEQ ID NO. 80
MGSKDDQSLVVAISPAAEPNGNHSVPIPFAYPSIPIQPRKHNKPIVHRRDFPSDFILGAGGSAYQCEGAYNEGNRGPSIW

SEQ ID NO: 429 - protein, 82 aa, Artificial sequence
  misc_feature: Ceres CLONE ID no.327253_T
  misc_feature: The sequence is a truncated version of Ceres CLONE ID no.327253
  misc_feature: Functional Homolog of Ceres CLONE ID no. 590462 at SEQ ID NO. 80
MGASGPAAPPATHRRRCIQLLLLLALAVAPLGSRGLRVRAAGADTGGLSRDAFPKGFVFGTATSAYQVEGAATSGGRGPCIW

SEQ ID NO: 430 - protein, 63 aa, Artificial sequence
  misc_feature: Public GI ID no.249262_T
  misc_feature: The sequence is a truncated version of Public GI ID no.249262
  misc_feature: Functional Homolog of Ceres CLONE ID no. 590462 at SEQ ID NO. 80
MLVLFISLLALTRPAMGTDDDDDNIPDDFSRKYFPDDFIFGTATSAYQIEGEATAKGRAPSVW

SEQ ID NO: 431 - protein, 60 aa, Artificial sequence
  misc_feature: Public GI ID no.28628597_T
  misc_feature: The sequence is a truncated version of Public GI ID no.28628597
  misc_feature: Functional Homolog of Ceres CLONE ID no. 590462 at SEQ ID NO. 80
MLVLLISFLALTKPAMADYDGIPADFNRSYFPDDFIFGTATSAYQIEGAANILGRGPSVW

SEQ ID NO: 432 - protein, 70 aa, Artificial sequence
  misc_feature: Public GI ID no.11034736_T
  misc_feature: The sequence is a truncated version of Public GI ID no.11034736
  misc_feature: Functional Homolog of Ceres CLONE ID no. 590462 at SEQ ID NO. 80
MKLLGLALVLLLAAASCKAGEEITCEENEPFTCSNTAKLSSKSFGKDFIFGVASSAYQIEGGRGRGVNIW

SEQ ID NO: 433 - protein, 71 aa, Artificial sequence
  misc_feature: Public GI ID no.127734_T
  misc_feature: The sequence is a truncated version of Public GI ID no.127734
  misc_feature: Functional Homolog of Ceres CLONE ID no. 590462 at SEQ ID NO. 80
MKLLHGLALVFLLAAASCKADEEITCEENEPFTCSNTDILSSKNFGKDFIFGVASSAYQIEGGRGRGVNVW

SEQ ID NO: 434 - protein, 76 aa, Artificial sequence
  misc_feature: Public GI ID no.17226270_T
  misc_feature: The sequence is a truncated version of Public GI ID no.17226270
  misc_feature: Functional Homolog of Ceres CLONE ID no. 590462 at SEQ ID NO. 80
MKANPPCLILLLLISATVLTVHSDDDDDDVSPENTILDTGGLSRESFPKGFTFGTATSAYQVEGSASTEGRGPSIW

SEQ ID NO: 435 - protein, 71 aa, Artificial sequence
  misc_feature: Public GI ID no.62131643_T
  misc_feature: The sequence is a truncated version of Public GI ID no.62131643
  misc_feature: Functional Homolog of Ceres CLONE ID no. 590462 at SEQ ID NO. 80
MKLLHGLALVFLLAGASCKADEEITCEENNPFTCSNTDILSSKNFGKDFIFGVASSAYQIEGGRGRGVNIW

SEQ ID NO: 436 - protein, 71 aa, Artificial sequence
  misc_feature: Public GI ID no.56130951_T
  misc_feature: The sequence is a truncated version of Public GI ID no.56130951
  misc_feature: Functional Homolog of Ceres CLONE ID no. 590462 at SEQ ID NO. 80
MKLLHGLALVFLLAAASCKADEEITCEENNPFTCSNTDILSSKNFGKDFIFGVASSAYQIEGGRGRGVNIW

SEQ ID NO: 437 - protein, 71 aa, Artificial sequence
  misc_feature: Public GI ID no.127733_T
  misc_feature: The sequence is a truncated version of Public GI ID no.127733
  misc_feature: Functional Homolog of Ceres CLONE ID no. 590462 at SEQ ID NO. 80
MKLLHGLALVFLLAAASCKADEEITCEENNPFTCSNTDILSSKNFGKDFIFGVASSAYQIEGGRGRGVNVW

SEQ ID NO: 438 - protein, 71 aa, Artificial sequence
  misc_feature: Public GI ID no.12621052_T
  misc_feature: The sequence is a truncated version of Public GI ID no.12621052
  misc_feature: Functional Homolog of Ceres CLONE ID no. 590462 at SEQ ID NO. 80
MKLLYGLALVFLLAAASCKADEEITCEQNEPFTCGNTDILSSKNFGKDFIFGVASSAYQIEGGRGRGVNVW

SEQ ID NO: 439 - protein, 70 aa, Artificial sequence
  misc_feature: Public GI ID no.71361195_T
  misc_feature: The sequence is a truncated version of Public GI ID no.71361195
  misc_feature: Functional Homolog of Ceres CLONE ID no. 590462 at SEQ ID NO. 80
MKLHGLALVFLLAVATCKAVEDITCQEKEPFTCSNTDSLNSKSFGKDFIFGVASSAYQIEGGRGRGPNTW

SEQ ID NO: 440 - protein, 68 aa, Artificial sequence
  misc_feature: Public GI ID no.56112345_T
  misc_feature: The sequence is a truncated version of Public GI ID no.56112345
  misc_feature: Functional Homolog of Ceres CLONE ID no. 590462 at SEQ ID NO. 80
MKLLGIALVLLLAVVTCKAEITCEEDKPFTCNQTERLNRNHFDPDFIFGFASSAYQIEGSRGRGINTW

SEQ ID NO: 441 - protein, 71 aa, Artificial sequence
  misc_feature: Public GI ID no.11034734_T
  misc_feature: The sequence is a truncated version of Public GI ID no.11034734
  misc_feature: Functional Homolog of Ceres CLONE ID no. 590462 at SEQ ID NO. 80
MKLLHGLALVFLLAAASCKAYEEITCEENEPFTCNNTARLSSKNFPKDFIFGVASSAYQIEGGRGRGVNIW

1.-33. (canceled)

34. A plant cell comprising an exogenous nucleic acid, said exogenous nucleic acid comprising a nucleotide sequence encoding a polypeptide, wherein the HMM bit score of the amino acid sequence of said polypeptide is greater than 50, said HMM based on the amino acid sequences depicted in one of FIGS. 1-14, and wherein a tissue of a plant produced from said plant cell has a difference in the level of oil as compared to the corresponding level in tissue of a control plant that does not comprise said nucleic acid.

35. A plant cell comprising an exogenous nucleic acid, said exogenous nucleic acid comprising a nucleotide sequence encoding a polypeptide 50-85 amino acids in length, wherein said polypeptide is the amino terminus of a polypeptide having at least 450 amino acids and having an HMM bit score greater than 622, said HMM based on the amino acid sequences depicted in FIG. 15, and wherein a tissue of a plant produced from said plant cell has a difference in the level of oil as compared to the corresponding level in tissue of a control plant that does not comprise said nucleic acid.

36. A plant cell comprising an exogenous nucleic acid, said exogenous nucleic acid comprising a nucleotide sequence encoding a polypeptide having 80 percent or greater sequence identity to an amino acid sequence selected from the group consisting of SEQ ID NO:80, SEQ ID NOs:82-85, SEQ ID NOs:87-127, SEQ ID NOs:129-130, SEQ ID NOs:132-133, SEQ ID NOs:135-138, SEQ ID NOs:140-146, SEQ ID NOs:148-149, SEQ ID NO:151, SEQ ID NO:153, SEQ ID NOs:155-160, SEQ ID NOs:162-164, SEQ ID NO:166, SEQ ID NOs:168-171, SEQ ID NO:173, SEQ ID NOs:175-177, SEQ ID NOs:179-183, SEQ ID NOs:185-188, SEQ ID NOs:190-193, SEQ ID NOs:195-196, SEQ ID NOs:198-199, SEQ ID NO:201, SEQ ID NOs:203-214, SEQ ID NO:216, SEQ ID NO:218, SEQ ID NOs:220-227, SEQ ID NOs:229-230, SEQ ID NOs:232-235, SEQ ID NOs:237-243, SEQ ID NO:245, SEQ ID NOs:247-249, SEQ ID NO:309, SEQ ID NO:311, SEQ ID NO:313, SEQ ID NO:315, SEQ ID NOs:317-318, SEQ ID NOs:320-321, SEQ ID NO:323, SEQ ID NO:325, SEQ ID NO:327, SEQ ID NO:329, SEQ ID NOs:331-332, SEQ ID NOs:334-335, SEQ ID NOs:337-338, SEQ ID NOs:340-341, SEQ ID NOs:343-344, SEQ ID NO:346, SEQ ID NO:348, SEQ ID NO:350, SEQ ID NOs:352-353, SEQ ID NO:355, SEQ ID NO:357, SEQ ID NOs:359-360, SEQ ID NO:367, and SEQ ID NOs:415-441, wherein a tissue of a plant produced from said plant cell has a difference in the level of oil as compared to the corresponding level in tissue of a control plant that does not comprise said nucleic acid.

37. A plant cell comprising an exogenous nucleic acid, said exogenous nucleic acid comprising a nucleotide sequence having 80 percent or greater sequence identity to a nucleotide sequence selected from the group consisting of SEQ ID NO:79, SEQ ID NO:81, SEQ ID NO:86, SEQ ID NO:128, SEQ ID NO:131, SEQ ID NO:134, SEQ ID NO:139, SEQ ID NO:147, SEQ ID NO:150, SEQ ID NO:152, SEQ ID NO:154, SEQ ID NO:161, SEQ ID NO:165, SEQ ID NO:167, SEQ ID NO:172, SEQ ID NO:174, SEQ ID NO:178, SEQ ID NO:184, SEQ ID NO:189, SEQ ID NO:194, SEQ ID NO:197, SEQ ID NO:200, SEQ ID NO:202, SEQ ID NO:215, SEQ ID NO:217, SEQ ID NO:219, SEQ ID NO:228, SEQ ID NO:231, SEQ ID NO:236, SEQ ID NO:244, SEQ ID NO:246, SEQ ID NOs:265-308, SEQ ID NO:310, SEQ ID NO:312, SEQ ID NO:314, SEQ ID NO:316, SEQ ID NO:319, SEQ ID NO:322, SEQ ID NO:324, SEQ ID NO:326, SEQ ID NO:328, SEQ ID NO:330, SEQ ID NO:333, SEQ ID NO:336, SEQ ID NO:339, SEQ ID NO:342, SEQ ID NO:345, SEQ ID NO:347, SEQ ID NO:349, SEQ ID NO:351, SEQ ID NO:354, SEQ ID NO:356, SEQ ID NO:358, and SEQ ID NOs:361-366, wherein a tissue of a plant produced from said plant cell has a difference in the level of oil as compared to the corresponding level in tissue of a control plant that does not comprise said nucleic acid.

38. A plant cell comprising an exogenous nucleic acid, said exogenous nucleic acid comprising a regulatory region operably linked to a polynucleotide whose transcription product is at least 30 nucleotides in length and is complementary to a nucleic acid encoding a polypeptide, wherein the HMM bit score of the amino acid sequence of said polypeptide is greater than 50, said HMM based on the amino acid sequences depicted in one of FIGS. 1-14, wherein said regulatory region modulates transcription of said polynucleotide in said plant cell, and wherein a tissue of a plant produced from said plant cell has a difference in the level of oil as compared to the corresponding level in tissue of a control plant that does not comprise said nucleic acid.

39. A plant cell comprising an exogenous nucleic acid, said exogenous nucleic acid comprising a regulatory region operably linked to a polynucleotide that is transcribed into an interfering RNA effective for inhibiting expression of a polypeptide having 80 percent or greater sequence identity to an amino acid sequence selected from the group consisting of SEQ ID NO:80, SEQ ID NOs:82-85, SEQ ID NOs:87-127, SEQ ID NOs:129-130, SEQ ID NOs:132-133, SEQ ID NOs:135-138, SEQ ID NOs:140-146, SEQ ID NOs:148-149, SEQ ID NO:151, SEQ ID NO:153, SEQ ID NOs:155-160, SEQ ID NOs:162-164, SEQ ID NO:166, SEQ ID NOs:168-171, SEQ ID NO:173, SEQ ID NOs:175-177, SEQ ID NOs:179-183, SEQ ID NOs:185-188, SEQ ID NOs:190-193, SEQ ID NOs:195-196, SEQ ID NOs:198-199, SEQ ID NO:201, SEQ ID NOs:203-214, SEQ ID NO:216, SEQ ID NO:218, SEQ ID NOs:220-227, SEQ ID NOs:229-230, SEQ ID NOs:232-235, SEQ ID NOs:237-243, SEQ ID NO:245, SEQ ID NOs:247-249, SEQ ID NO:309, SEQ ID NO:311, SEQ ID NO:313, SEQ ID NO:315, SEQ ID NOs:317-318, SEQ ID NOs:320-321, SEQ ID NO:323, SEQ ID NO:325, SEQ ID NO:327, SEQ ID NO:329, SEQ ID NOs:331-332, SEQ ID NOs:334-335, SEQ ID NOs:337-338, SEQ ID NOs:340-341, SEQ ID NOs:343-344, SEQ ID NO:346, SEQ ID NO:348, SEQ ID NO:350, SEQ ID NOs:352-353, SEQ ID NO:355, SEQ ID NO:357, SEQ ID NOs:359-360, SEQ ID NO:367, and SEQ ID NOs:415-441, wherein said regulatory region modulates transcription of said polynucleotide in said plant cell, and wherein a tissue of a plant produced from said plant cell has a difference in the level of oil as compared to the corresponding level in tissue of a control plant that does not comprise said nucleic acid.

40. The plant cell of any of claims 34-39, wherein said plant is a dicot.

41. The plant cell of claim 40, wherein said plant is a member of the genus Anacardium, Arachis, Azadirachta, Brassica, Cannabis, Carthamus, Corylus, Crambe, Cucurbita, Glycine, Gossypium, Helianthus, Jatropha, Juglans, Linum, Olea, Papaver, Persea, Prunus, Ricinus, Sesamum, Simmondsia, or Vitis.

42. The plant cell of any of claims 34-39, wherein said plant is a monocot.

43. The plant cell of claim 42 wherein said plant is a member of the genus Cocos, Elaeis, Oryza, or Zea.

44. The plant cell of any of claims 34-39, wherein said plant is a species selected from the group consisting of Miscanthus hybrid (Miscanthus×giganteus), Miscanthus sinensis, Miscanthus sacchariflorus, Panicum virgatum, Populus balsamifera, Sorghum bicolor, and Saccharum spp.

45. The plant cell of any of claims 34-39, wherein said tissue is seed tissue.

46. A transgenic plant comprising the plant cell of any one of claims 34-39.

47. Progeny of the plant of claim 46, wherein said progeny has a difference in the level of oil as compared to the level of oil in a corresponding control plant that does not comprise said exogenous nucleic acid.

48. Seed from a transgenic plant according to claim 46.

49. Vegetative tissue from a transgenic plant according to claim 46.

50. Fruit from a transgenic plant according to claim 46.

51.-98. (canceled)
